(19) United States
(12) Patent Application Publication
(10) Pub. No.: US 2025/0019699 A1
(43) Pub. Date: Jan. 16, 2025

(54) COMPOSITIONS AND METHODS FOR INHIBITING EXPRESSION OF THE LECT2 GENE

(71) Applicant: ALNYLAM PHARMACEUTICALS, INC., CAMBRIDGE, MA (US)

(72) Inventors: GREGORY HINKLE, PLYMOUTH, MA (US); HUILEI XU, CAMBRIDGE, MA (US)

(73) Assignee: ALNYLAM PHARMACEUTICALS, INC., CAMBRIDGE, MA (US)

(21) Appl. No.: 18/637,183

(22) Filed: Apr. 16, 2024

Related U.S. Application Data
(63) Continuation of application No. 17/268,206, filed on Feb. 12, 2021, now Pat. No. 11,987,792.
(60) Provisional application No. 62/764,909, filed on Aug. 16, 2018.

(51) Int. Cl. C12N 15/113; A61K 9/00; A61K 9/08; A61K 9/51; A61K 47/02

(52) U.S. Cl. CPC C12N 15/113; A61K 9/0019; A61K 9/08; A61K 9/5123; A61K 47/02; C12N 2310/14; C12N 2310/321; C12N 2310/322; C12N 2310/351; C12N 2310/3515; C12N 2320/32; C12N 2320/35

(57) ABSTRACT

The invention relates to double-stranded ribonucleic acid (dsRNA) compositions targeting the LECT2 gene, and methods of using such dsRNA compositions to alter (e.g., inhibit) expression of LECT2.

### CROSS-REFERENCE TO RELATED APPLICATIONS

[0001] The present application is a continuation of U.S. application Ser. No. 17/268,206 filed Feb. 12, 2021, which is a U.S. National Phase application under 35 U.S.C. § 371 of International Application No. PCT/US2019/046657, filed Aug. 15, 2019, which claims the benefit of U.S. Provisional Application No. 62/764,909 filed Aug. 16, 2018, hereby incorporated by reference herein.

### SEQUENCE LISTING

[0002] The instant application contains a Sequence Listing which has been submitted electronically in XML format and is hereby incorporated by reference in its entirety. The XML copy, created on Jun. 10, 2024, is named ALN_250_Seq_List.xml and is 3,220,380 bytes in size.

### FIELD OF THE INVENTION

[0003] The invention relates to the specific inhibition of the expression of the LECT2 gene.

### BACKGROUND OF THE INVENTION

[0004] Amyloidosis is a group of diseases characterized by deposition of insoluble fibrous protein aggregates, called amyloids, in organs or tissues. Amyloids can form from mutant or wild type proteins. One system of nomenclature for amyloid diseases uses an abbreviation for the protein that forms amyloid deposits, preceded by the letter “A.” Thus, for example, ALECT2 is the abbreviation for an amyloidosis involving deposit of amyloids formed from leukocyte cell derived chemotactic factor-2 (ALECT2).

[0005] LECT2 amyloidosis (ALECT2) is one of the most recently discovered types of amyloidosis. LECT2 amyloidosis has been observed in individuals with renal or hepatic amyloidosis. This form of amyloidosis can present with nephrotic syndrome or with liver involvement (e.g., hepatitis, e.g., chronic hepatitis). It may be particularly prevalent in Mexican Americans and/or individuals who are homozygous for the G allele encoding valine at position 40 in the mature LECT2 protein (or at position 58 in the unprocessed protein). Treatments for LECT2 amyloidosis are limited, and new treatments are needed.

### SUMMARY OF THE INVENTION

[0006] The present invention describes methods and iRNA compositions for modulating the expression of a LECT2 gene. In certain embodiments, expression of a LECT2 gene is reduced or inhibited using a LECT2-specific iRNA. Such inhibition can be useful in treating disorders related to LECT2 expression, such as amyloidosis, e.g. a LECT2 amyloidosis (ALECT2).

[0007] Accordingly, described herein are compositions and methods that effect the RNA-induced silencing complex (RISC)-mediated cleavage of RNA transcripts of the LECT2 gene, such as in a cell or in a subject (e.g., in a mammal, such as a human subject). Also described are compositions and methods for treating a disorder related to expression of a LECT2 gene, such as a LECT2 amyloidosis.

[0008] In some embodiments, the LECT2 amyloidosis is a renal amyloidosis.

[0009] In some embodiments, the LECT2 amyloidosis involves amyloid deposition in the kidney.

[0010] In some embodiments, LECT2 amyloidosis is associated with renal disease (e.g., nephrotic syndrome). In some embodiments, the amyloidosis is associated with proteinuria. In some embodiments, proteinuria is absent.

[0011] In some embodiments, the LECT2 amyloidosis is a hepatic amyloidosis. In some embodiments, the LECT2 amyloidosis involves amyloid deposition in the liver.

[0012] In some embodiments, the LECT2 amyloidosis is associated with inflammation in the liver (e.g., hepatitis, e.g., chronic hepatitis).

[0013] In some embodiments, the methods described herein are effective to inhibit amyloid deposition (e.g., by preventing amyloid deposition or reducing amyloid deposition, e.g., by reducing size, number, or extent of amyloid deposits) or symptoms associated with amyloid deposition.

[0014] As used herein, the term “iRNA,” “RNAi”, “iRNA agent,” “RNAi agent,” or “iRNA molecule,” refers to an agent that contains RNA as that term is defined herein, and which mediates the targeted cleavage of an RNA transcript, e.g., via an RNA-induced silencing complex (RISC) pathway. In one embodiment, an iRNA as described herein inhibits LECT2 expression in a cell or mammal.

[0015] The iRNAs (e.g., dsRNAs) included in the compositions featured herein include an RNA strand (the antisense strand) having a region, e.g., a region that is 30 nucleotides or less, generally 19-24 nucleotides in length, that is substantially complementary to at least part of an mRNA transcript of a LECT2 gene (e.g., a mouse or human LECT2 gene) (also referred to herein as a “LECT2-specific iRNA”). In embodiments, the LECT2 mRNA transcript is a human LECT2 mRNA transcript, e.g., SEQ ID NO: 1. In embodiments, the LECT2 mRNA transcript has a A to G substitution at nucleotide position 373 of SEQ ID NO: 1. In embodiments, the mRNA transcript encodes valine at position 40 in the mature LECT2 protein (or amino acid 58 in the unprocessed protein). In embodiments, the mRNA transcript encodes isoleucine at position 40 in the mature LECT2 protein (or amino acid 58 in the unprocessed protein).

[0016] In embodiments, the iRNA (e.g, dsRNA) described herein comprises an antisense strand having a region that is substantially complementary to a region of a human LECT2 mRNA. In embodiments, the human LECT2 mRNA has the sequence of NM_002302.2 (SEQ ID NO: 1). In embodiments, the human LECT2 mRNA has a A to G substitution at nucleotide position 373 of SEQ ID NO: 1.

[0017] In other embodiments, an iRNA encompasses a dsRNA having an RNA strand (the antisense strand) having a region that is substantially complementary to a portion of a LECT2 mRNA. In one embodiment, the iRNA encompasses a dsRNA having an RNA strand (the antisense strand) having a region that is substantially complementary to a portion of a LECT2 mRNA, e.g., a human LECT2 mRNA (e.g., a human LECT2 mRNA as provided in NM_002302.2 (SEQ ID NO: 1) or having a A to G substitution at nucleotide position 373 of SEQ ID NO: 1).

[0018] In one embodiment, an iRNA for inhibiting expression of a LECT2 gene includes at least two sequences that are complementary to each other. The iRNA includes a sense strand having a first sequence and an antisense strand having a second sequence. The antisense strand includes a nucleotide sequence that is substantially complementary to at least part of an mRNA encoding a LECT2 transcript, and the region of complementarity is 30 nucleotides or less, and at least 15 nucleotides in length. Generally, the iRNA is 19 to 24 nucleotides in length.

[0019] In some embodiments, the iRNA is 19-21 nucleotides in length. In some embodiments, the iRNA is 19-21 nucleotides in length and is in a lipid formulation, e.g. a lipid nanoparticle (LNP) formulation (e.g., an LNP11 formulation). In one embodiment, the iRNA targeting LECT2 is formulated in a stable nucleic acid lipid particle (SNALP).

[0020] In some embodiments, the iRNA is 21-23 nucleotides in length. In some embodiments, the iRNA is 21-23 nucleotides in length and is in the form of a conjugate, e.g., conjugated to one or more GalNAc derivatives as described herein.

[0021] In some embodiments the iRNA is from about 15 to about 25 nucleotides in length, and in other embodiments the iRNA is from about 25 to about 30 nucleotides in length. An iRNA targeting LECT2, upon contact with a cell expressing LECT2, inhibits the expression of a LECT2 gene (e.g., by at least 10%, at least 20%, at least 25%, at least 30%, at least 35% or at least 40%, at least 50%, at least 60%, at least 70%, or at least 80%) when assayed by a method known in the art or as described herein.

[0022] In one embodiment, an iRNA (e.g., a dsRNA) featured herein comprises or consists of a first sequence of a dsRNA that is selected from the group consisting of the sense sequences of Tables 2 and 3, and a second sequence that is selected from the group consisting of the corresponding antisense sequences of Tables 2 and 3.

[0023] In embodiments, an iRNA (e.g., dsRNA) featured herein comprises or consists of a sense and/or antisense sequence selected from those provided in Table 2 and 3.

[0024] The iRNA molecules featured herein can include naturally occurring nucleotides or can include at least one modified nucleotide, including, but not limited to a 2′-O-methyl modified nucleotide, a nucleotide having a 5′-phosphorothioate group, and a terminal nucleotide linked to a cholesteryl derivative. Alternatively, the modified nucleotide may be chosen from the group of: a 2′-deoxy-2′-fluoro modified nucleotide, a 2′-deoxy-modified nucleotide, a locked nucleotide, an acyclic nucleotide, an abasic nucleotide, 2′-amino-modified nucleotide, 2′-alkyl-modified nucleotide, morpholino nucleotide, a phosphoramidate, and a non-natural base comprising nucleotide. Such a modified sequence can be based, e.g., on a first sequence of said iRNA selected from the group consisting of the sense sequences of Tables 2 and 3, and a second sequence selected from the group consisting of the corresponding antisense sequences of Tables 2 and 3.

[0025] In one embodiment, an iRNA as described herein targets a wildtype LECT2 RNA transcript variant, and in another embodiment, the iRNA targets a mutant transcript (e.g., a LECT2 RNA carrying an allelic variant). For example, an iRNA featured in the invention can target a polymorphic variant, such as a single nucleotide polymorphism (SNP), of LECT2.

[0026] In some embodiments, the iRNA (e.g., dsRNA) targets (e.g., reduces) mRNA that encodes valine at position 40 in the mature LECT2 protein (or amino acid 58 in the unprocessed protein). In some embodiments, the iRNA (e.g., dsRNA) targets (e.g., reduces) mRNA that encodes isoleucine at position 40 in the mature LECT2 protein (or amino acid 58 in the unprocessed protein). In another embodiment, the iRNA (e.g., dsRNA) targets (e.g., reduces) both mRNA that encodes valine and mRNA that encodes isoleucine at position 40 in the mature LECT2 protein (or amino acid 58 in the unprocessed protein).

[0027] In another embodiment, the iRNA targets both a wildtype and a mutant LECT2 transcript. In yet another embodiment, the iRNA targets a particular transcript variant of LECT2. In yet another embodiment, the iRNA agent targets multiple transcript variants.

[0028] In one embodiment, an iRNA featured in the invention targets a non-coding region of a LECT2 RNA transcript, such as the 5′ or 3′ untranslated region of a transcript.

[0029] In some embodiments, an iRNA as described herein is in the form of a conjugate, e.g., a carbohydrate conjugate, which may serve as a targeting moiety and/or ligand, as described herein. In one embodiment, the conjugate is attached to the 3′ end of the sense strand of the dsRNA. In some embodiments, the conjugate is attached via a linker, e.g., via a bivalent or trivalent branched linker.

[0030] In some embodiments, the conjugate comprises one or more N-acetylgalactosamine (GalNAc) derivatives. Such a conjugate is also referred to herein as a GalNAc conjugate. In some embodiments, the conjugate targets the RNAi agent (e.g., dsRNA) to a particular cell, e.g., a liver cell, e.g., a hepatocyte. The GalNAc derivatives can be attached via a linker, e.g., a bivalent or trivalent branched linker. In particular embodiments, the conjugate is

[chemical structure]

[0031] In some embodiments, the RNAi agent is attached to the carbohydrate conjugate via a linker, e.g., a linker as shown in the following schematic, wherein X is O or S

[chemical structure]

[0032] In some embodiments, X is O. In some embodiments, X is S.

[0033] In some embodiments, the RNAi agent is conjugated to L96 as defined in Table 1 and shown below

[chemical structure]

[0034] In some embodiments, the RNAi agent is conjugated to a ligand that targets the RNAi (e.g., dsRNA) to a desired organ (e.g., the liver) or to a particular cell type (e.g., hepatocytes). In embodiments, the RNAi agent is conjugated to a ligand (e.g., a GalNAc ligand, e.g., L96) that targets the RNAi agent (e.g., dsRNA) to the liver.

[0035] In an aspect provided herein is a pharmaceutical composition for inhibiting the expression of a LECT2 gene in an organism, generally a human subject. The composition typically includes one or more of the iRNAs described herein and a pharmaceutically acceptable carrier or delivery vehicle. In one embodiment, the composition is used for treating a disorder related to LECT2 expression, e.g., amyloidosis, e.g., LECT2 amyloidosis.

[0036] In one aspect, an iRNA provided herein is a double-stranded ribonucleic acid (dsRNA) for inhibiting expression of LECT2, wherein said dsRNA comprises a sense strand and an antisense strand 15-30 base pairs in length and the antisense strand is complementary to at least 15 contiguous nucleotides of SEQ ID NO: 1.

[0037] In a further aspect, an iRNA provided herein is a double stranded RNAi (dsRNA) comprising a sense strand complementary to an antisense strand, wherein said antisense strand comprises a region of complementarity to a LECT2 RNA transcript, wherein each strand has about 14 to about 30 nucleotides, wherein said double stranded RNAi agent is represented by formula (III):

(III)
sense:
5′ nₚ-Nₐ-(X X X)ᵢ-N_{b}-Y Y Y-N_{b}-(Z Z Z)ⱼ-Nₐ-n_{q} 3′
antisense:
3′ nₚ′-Nₐ′-(X′X′X′)k-N_{b}′-Y′Y′Y′-N_{b}′-(Z′Z′Z′)₁-
Nₐ′-n_{q}′ 5′

[0038] wherein:
[0039] i, j, k, and 1 are each independently 0 or 1;
[0040] p, p′, q, and q′ are each independently 0-6;
[0041] each Nₐ and Nₐ′ independently represents an oligonucleotide sequence comprising 0-25 nucleotides which are either modified or unmodified or combinations thereof, each sequence comprising at least two differently modified nucleotides;
[0042] each N_{b} and N_{b}′ independently represents an oligonucleotide sequence comprising 0-10 nucleotides which are either modified or unmodified or combinations thereof;
[0043] each nₚ, nₚ′, n_{q}, and n_{q}′ independently represents an overhang nucleotide;
[0044] XXX, YYY, ZZZ, X′X′X′, Y′Y′Y′, and Z′Z′Z′ each independently represent one motif of three identical modifications on three consecutive nucleotides;
[0045] modifications on N_{b} differ from the modification on Y and modifications on N_{b}′ differ from the modification on Y′.

[0046] In embodiments, the sense strand is conjugated to at least one ligand.

[0047] In embodiments, i is 1; j is 1; or both i and j are 1.

[0048] In embodiments, k is 1; l is 1; or both k and l are 1.

[0049] In embodiments, XXX is complementary to X′X′X′, YYY is complementary to Y′Y′Y′, and ZZZ is complementary to Z′Z′Z′.

[0050] In embodiments, the Y′Y′Y′ motif occurs at the 11, 12 and 13 positions of the antisense strand from the 5′-end.

[0051] In embodiments, the Y′ is 2′-O-methyl.

[0052] In embodiments, the duplex region is 15-30 nucleotide pairs in length.

[0053] In embodiments, the duplex region is 17-23 nucleotide pairs in length.

[0054] In embodiments, the duplex region is 19-21 nucleotide pairs in length.

[0055] In embodiments, the duplex region is 21-23 nucleotide pairs in length.

[0056] In embodiments, the modifications on the nucleotides are selected from the group consisting of a locked nucleic acid (LNA), an acyclic nucleotide, a hexitol or hexose nucleic acid (HNA), a cyclohexene nucleic acid (CeNA), 2′-methoxyethyl, 2′-O-alkyl, 2′-O-allyl, 2′-C-allyl, 2′-fluoro, 2′-deoxy, 2′-hydroxyl, and any combination thereof.

[0057] In embodiments, the modifications on the nucleotides are 2′-O-methyl, 2′-fluoro or both.

[0058] In embodiments, the ligand comprises a carbohydrate.

[0059] In embodiments, the ligand is attached via a linker.

[0060] In embodiments, the linker is a bivalent or trivalent branched linker.

[0061] In embodiments, the ligand is

[chemical structure]

[0062] In embodiments, the ligand and linker are as shown in Formula XXIV:

[chemical structure]

[0063] In embodiments, the ligand is attached to the 3′ end of the sense strand.

[0064] In embodiments, the dsRNA has (e.g., comprises) a nucleotide sequence (e.g., a sense and/or antisense sequence) selected from the group of sequences provided in Tables 2-5.

[0065] In a further aspect, an iRNA provided herein is a double-stranded ribonucleic acid (dsRNA) for inhibiting expression of LECT2, wherein said dsRNA comprises a sense strand and an antisense strand, the antisense strand comprising a region of complementarity to a LECT2 RNA transcript, which antisense strand comprises at least 15 contiguous nucleotides differing by no more than 3 nucleotides from one of the antisense sequences listed in any one of Tables 2 and 3.

[0066] In some embodiments, the dsRNA comprises at least one modified nucleotide.

[0067] In some embodiments, at least one of the modified nucleotides is chosen from the group consisting of: a 2′-O-methyl modified nucleotide, a nucleotide comprising a 5′-phosphorothioate group, and a terminal nucleotide linked to a cholesteryl derivative or dodecanoic acid bisdecylamide group.

[0068] In some embodiments, the modified nucleotide is chosen from the group consisting of: a 2′-deoxy-2′-fluoro modified nucleotide, a 2′-deoxy-modified nucleotide, a locked nucleotide, an acyclic nucleotide, an abasic nucleotide, 2′-amino-modified nucleotide, 2′-alkyl-modified nucleotide, morpholino nucleotide, a phosphoramidate, and a non-natural base comprising nucleotide.

[0069] In some embodiments, the region of complementarity is at least 17 nucleotides in length.

[0070] In some embodiments, the region of complementarity is between 19 and 21 nucleotides in length.

[0071] In some embodiments, the region of complementarity is 19 nucleotides in length.

[0072] In some embodiments, each strand is no more than 30 nucleotides in length.

[0073] In some embodiments, at least one strand comprises a 3′ overhang of at least 1 nucleotide.

[0074] In some embodiments, at least one strand comprises a 3′ overhang of at least 2 nucleotides.

[0075] In some embodiments, an iRNA (e.g., a dsRNA) described herein further comprises a ligand.

[0076] In some embodiments, the ligand is a GalNAc ligand.

[0077] In some embodiments, the ligand targets the iRNA (e.g., the dsRNA) to the liver (e.g., to hepatocytes).

[0078] In some embodiments, the ligand is conjugated to the 3′ end of the sense strand of the dsRNA.

[0079] In some embodiments, the region of complementarity consists of an antisense sequence selected from the antisense sequences provided in Tables 2 and 3.

[0080] In embodiments, the region of complementarity consists of an antisense sequence selected from a duplex disclosed herein, wherein the duplex suppresses LECT2 mRNA or protein expression by at least 20%, 30%, 40%, 50%, 60%, 70%, 80%, 85% or 90%.

[0081] In some embodiments, the dsRNA comprises a sense strand comprising or consisting of a sense strand sequence selected from Table 2, 3, 4, or 5, and an antisense strand comprising or consisting of an antisense sequence selected from Table 2, 3, 4, or 5. In embodiments, the dsRNA comprises or consists of a pair of corresponding sense and antisense sequences selected from those of the duplexes disclosed in Tables 2-5. In certain embodiments, the dsRNA comprises or consists of a pair of corresponding sense and antisense sequences selected from those of the duplexes disclosed in Table 2. In certain embodiments, the dsRNA comprises or consists of a pair of corresponding sense and antisense sequences selected from those of the duplexes disclosed in Table 3. In certain embodiments, the dsRNA comprises or consists of a pair of corresponding sense and antisense sequences selected from those of the duplexes disclosed in Table 4. In certain embodiments, the dsRNA comprises or consists of a pair of corresponding sense and antisense sequences selected from those of the duplexes disclosed in Table 5.

[0082] In one aspect, the invention provides a cell containing at least one iRNA (e.g., dsRNAs) disclosed herein. The cell is typically a mammalian cell, such as a human cell. In embodiments, the cell is a liver cell (e.g., a hepatocyte).

[0083] In an aspect provided herein is a pharmaceutical composition for inhibiting expression of a LECT2 gene, the composition comprising an iRNA (e.g., a dsRNA) described herein.

[0084] In embodiments of the pharmaceutical compositions described herein, the iRNA (e.g., dsRNA) is administered in an unbuffered solution. In embodiments, the unbuffered solution is saline or water.

[0085] In embodiments of the pharmaceutical compositions described herein, the iRNA (e.g., dsRNA is administered with a buffer solution. In embodiments, the buffer solution comprises acetate, citrate, prolamine, carbonate, or phosphate or any combination thereof. In embodiments, the buffer solution is phosphate buffered saline (PBS).

[0086] In embodiments of the pharmaceutical compositions described herein, the iRNA (e.g., dsRNA) is targeted to the liver (e.g., to hepatocytes).

[0087] In embodiments of the pharmaceutical compositions described herein, the composition is administered intravenously.

[0088] In embodiments of the pharmaceutical compositions described herein, the composition is administered subcutaneously.

[0089] In embodiments, a pharmaceutical composition comprises an iRNA (e.g., a dsRNA) described herein that comprises a ligand (e.g., a GalNAc ligand) that targets the iRNA (e.g., dsRNA) to a liver cell, e.g., a hepatocyte.

[0090] In embodiments, a pharmaceutical composition comprises an iRNA (e.g., a dsRNA) described herein that comprises a ligand (e.g., a GalNAc ligand), and the pharmaceutical composition is administered subcutaneously. In embodiments, the ligand targets the iRNA (e.g., dsRNA) to a liver cell, e.g., a hepatocyte.

[0091] In certain embodiments, a pharmaceutical composition, e.g., a composition described herein, includes a lipid formulation. In some embodiments, the RNAi agent is in a LNP formulation, e.g., a MC3 formulation. In some embodiments, the LNP formulation targets the RNAi agent to a particular cell, e.g., a liver cell (e.g., a hepatocyte). In embodiments, the lipid formulation is a LNP11 formulation. In embodiments, the composition is administered intravenously.

[0092] In another embodiment, the pharmaceutical composition is formulated for administration according to a dosage regimen described herein, e.g., not more than once every four weeks, not more than once every three weeks, not more than once every two weeks, or not more than once every week. In another embodiment, the administration of the pharmaceutical composition can be maintained for a month or longer, e.g., one, two, three, or six months, or one year or longer.

[0093] In another embodiment, a composition containing an iRNA featured in the invention, e.g., a dsRNA targeting LECT2, is administered in conjunction with a second therapy for a disorder related to LECT2 expression (e.g., a LECT2 amyloidosis). An iRNA or composition comprising an iRNA provided herein can be administered before, after, or concurrent with a second therapy. In embodiments, the iRNA is administered before the second therapy. In embodiments, the iRNA is administered after the second therapy. In embodiments, the iRNA is administered concurrent with the second therapy.

[0094] In some embodiments, the second therapy is a non-iRNA therapeutic agent that is effective to treat the disorder or symptoms of the disorder.

[0095] In some embodiments, the disorder to be treated by the compositions or methods disclosed herein is a LECT2 amyloidosis that affects kidney function, e.g., through amyloid deposition in the kidney. In some such embodiments, the iRNA is administered in conjunction with a therapy that supports kidney function (e.g., dialysis). In embodiments, the iRNA is administered in conjunction with a diuretic, an ACE (angiotensin converting enzyme) inhibitor, an angiotensin receptor blocker, and/or dialysis, e.g., to support or manage kidney function.

[0096] In some embodiments, the disorder to be treated by the compositions or methods disclosed herein is a LECT2 amyloidosis involving amyloid deposits in the liver. In some such embodiments, the iRNA is administered in conjunction with a therapy that supports liver function.

[0097] In some embodiments, the disorder to be treated by the compositions or methods disclosed herein is a LECT2 amyloidosis, and the iRNA is administered in conjunction with removal of all or part of the organ(s) affected by the amyloidosis (e.g., resection of all or part of kidney or liver tissue affected by the amyloidosis). The removal is optionally conducted in conjunction with a replacement of all or part of the organ removed (e.g., in conjunction with a kidney or liver organ transplant).

[0098] In an aspect provided herein is a method of inhibiting LECT2 expression in a cell, the method comprising: (a) introducing into the cell an iRNA (e.g., a dsRNA) described herein and (b) maintaining the cell of step (a) for a time sufficient to obtain degradation of the mRNA transcript of a LECT2 gene, thereby inhibiting expression of the LECT2 gene in the cell.

[0099] In an aspect provided herein is a method for reducing or inhibiting the expression of a LECT2 gene in a cell (e.g., a liver cell, e.g., a hepatocyte). The method includes contacting the cell with a dsRNA as described herein, thereby inhibiting expression of a LECT2 gene. “Contacting,” as used herein, includes directly contacting a cell, as well as indirectly contacting a cell. For example, a cell within a subject (e.g., a liver cell) may be contacted when a composition comprising an RNAi is administered (e.g., intravenously or subcutaneously) to the subject.

[0100] In embodiments, the method includes
[0101] (a) introducing into the cell a double-stranded ribonucleic acid (dsRNA), wherein the dsRNA includes at least two sequences that are complementary to each other. The dsRNA has a sense strand having a first sequence and an antisense strand having a second sequence; the antisense strand has a region of complementarity that is substantially complementary to at least a part of an mRNA encoding LECT2, and where the region of complementarity is 30 nucleotides or less, e.g., 15-30 nucleotides in length, and generally 19-24 nucleotides in length, and where the dsRNA upon contact with a cell expressing LECT2, inhibits expression of a LECT2 gene by at least 10%, e.g., at least 20%, at least 30%, at least 40% or more; and
[0102] (b) maintaining the cell of step (a) for a time sufficient to obtain degradation of the mRNA transcript of the LECT2 gene, thereby reducing or inhibiting expression of a LECT2 gene in the cell.

[0103] In embodiments of the foregoing methods of inhibiting LECT2 expression in a cell, the cell is treated ex vivo, in vitro, or in vivo. In embodiments, the cell is a hepatocyte.

[0104] In embodiments, the cell is present in a subject in need of treatment, prevention and/or management of a disorder related to LECT2 expression.

[0105] In embodiments, the disorder is a LECT2 amyloidosis, as described herein.

[0106] In embodiments, the expression of LECT2 is inhibited by at least 30%.

[0107] In embodiments, the iRNA (e.g., dsRNA) has an IC₅₀ in the range of 0.0005-1 nM, e.g., between 0.001 and 0.2 nM, between 0.002 and 0.1 nM, between 0.005 and 0.075 nM, or between 0.01 and 0.05 nM. In embodiments, the iRNA (e.g., dsRNA) has an IC₅₀ equal to or less than 0.02 nM, e.g., between 0.0005 and 0.02 nM, between 0.001 and 0.02 nM, between 0.005 and 0.02 nM, or between 0.01 and 0.02 nM. In embodiments, the iRNA (e.g., dsRNA) has an IC₅₀ in the range of 0.01-1 nM.

[0108] In embodiments, the cell (e.g., the hepatocyte) is a mammalian cell (e.g., a human, non-human primate, or rodent cell).

[0109] In one embodiment, the subject is a mammal (e.g., a human) having a LECT2 amyloidosis.

[0110] In one embodiment, the dsRNA introduced reduces or inhibits expression of a LECT2 gene in the cell.

[0111] In one embodiment, the dsRNA inhibits expression of a LECT2 gene, or inhibits amyloid deposition (e.g., by preventing amyloid deposition or reducing amyloid deposition, e.g., by reducing size, number, or extent of amyloid deposits). The inhibition optionally involves an inhibition of at least 5%, 10%, 15%, 20%, 25%, 30%, 35%, 40%, 45%, 50% or more compared to a reference, (e.g., a control that is untreated or treated with a non-targeting dsRNA (e.g., a dsRNA that does not target LECT2)).

[0112] In other aspects, the disclosure provides methods for treating pathological processes related to LECT2 expression (e.g., amyloid deposition). In one embodiment, the method includes administering to a subject, e.g., a patient in need of such treatment, an effective (e.g., a therapeutically or prophylactically effective) amount of a dsRNA provided herein.

[0113] In an aspect provided herein is a method of treating and/or preventing a disorder related to LECT2 expression (e.g., a LECT2 amyloidosis) comprising administering to a subject in need of such treatment a therapeutically effective amount of an iRNA (e.g., a dsRNA) described herein, or a composition comprising an iRNA (e.g., a dsRNA) described herein.

[0114] In an aspect provided herein is a method of treating a disorder related to LECT2 expression (e.g., LECT2 amyloidosis) comprising administering to a subject in need of such treatment a double-stranded ribonucleic acid (dsRNA), wherein said dsRNA comprises a sense strand and an antisense strand 15-30 base pairs in length and the antisense strand is complementary to at least 15 contiguous nucleotides of a LECT2 mRNA transcript, e.g., a human LECT2 mRNA transcript, e.g., SEQ ID NO: 1 or a nucleotide sequence having a A to G substitution at nucleotide position 373 of SEQ ID NO: 1. In one embodiment, the iRNA (e.g., dsRNA) targets mRNA that encodes valine at position 40 in the mature LECT2 protein (or amino acid 58 in the unprocessed protein).

[0115] In one embodiment provided herein is a method of treating a subject having a LECT2 amyloidosis, the method comprising administering to the subject a double-stranded ribonucleic acid (dsRNA), wherein said dsRNA comprises a sense strand and an antisense strand 15-30 base pairs in length and the antisense strand is complementary to at least 15 contiguous nucleotides of a LECT2 mRNA transcript, e.g., a human LECT2 mRNA transcript, e.g., SEQ ID NO: 1 or a nucleotide sequence having a A to G substitution at nucleotide position 373 of SEQ ID NO: 1. In one embodiment, the iRNA (e.g., dsRNA) targets mRNA that encodes valine at position 40 in the mature LECT2 protein (or amino acid 58 in the unprocessed protein).

[0116] In some embodiments, administration of the iRNA targeting LECT2 alleviates or relieves the severity of at least one symptom of a disorder related to LECT2 expression in the patient.

[0117] In one embodiment, subject has a LECT2 amyloidosis. In another embodiment, the subject is at risk for developing a LECT2 amyloidosis.

[0118] In embodiments, the iRNA (e.g., dsRNA) is formulated as an LNP formulation.

[0119] In embodiments, the iRNA (e.g., dsRNA) is in the form of a GalNAc conjugate.

[0120] In embodiments, the iRNA (e.g., dsRNA) is administered at a dose of 0.05-50 mg/kg.

[0121] In embodiments, the iRNA (e.g., dsRNA) is administered at a concentration of 0.01 mg/kg-5 mg/kg bodyweight of the subject.

[0122] In embodiments, the iRNA (e.g., dsRNA) is formulated as an LNP formulation and is administered at a dose of 0.05-5 mg/kg. In embodiments, the iRNA (e.g., dsRNA) is formulated as an LNP formulation and is administered at a dose of 0.1 to 0.5 mg/kg.

[0123] In embodiments, the iRNA (e.g., dsRNA) is in the form of a GalNAc conjugate and is administered at a dose of 0.5-50 mg/kg. In embodiments, the iRNA (e.g., dsRNA) is in the form of a GalNAc conjugate and is administered at a dose of 1 to 10 mg/kg.

[0124] In embodiments, the method inhibits expression of a LECT2 gene, or inhibits amyloid deposition (e.g., by preventing amyloid deposition or reducing amyloid deposition, e.g., by reducing size, number, or extent of amyloid deposits). The inhibition optionally involves an inhibition of at least 5%, 10%, 15%, 20%, 25%, 30%, 35%, 40%, 45%, 50%, 55%, 60%, 65%, 70%, 75%, 80%, 85%, or 90% compared to a reference (e.g., a control that is untreated or treated with a non-targeting dsRNA (e.g., a dsRNA that does not target LECT2)).

[0125] In embodiments, the iRNA (e.g., dsRNA) has an IC₅₀ in the range of 0.0005-1 nM, e.g., between 0.001 and 0.2 nM, between 0.002 and 0.1 nM, between 0.005 and 0.075 nM, or between 0.01 and 0.05 nM. In embodiments, the iRNA (e.g., dsRNA) has an IC₅₀ equal to or less than 0.02 nM, e.g., between 0.0005 and 0.02 nM, between 0.001 and 0.02 nM, between 0.005 and 0.02 nM, or between 0.01 and 0.02 nM. In embodiments, the iRNA (e.g., dsRNA) has an IC₅₀ in the range of 0.01-1 nM.

[0126] In embodiments, a method described herein ameliorates a symptom associated with a LECT2 related disorder (e.g., a LECT2 amyloidosis).

[0127] In embodiments, a method described herein inhibits expression of a LECT2 gene in the subject.

[0128] In embodiments, a method described herein inhibits inhibits amyloid deposition (e.g., by preventing amyloid deposition or reducing amyloid deposition, e.g., by reducing size, number, or extent of amyloid deposits).

[0129] In embodiments, the iRNA (e.g., dsRNA) or composition comprising the iRNA is administered according to a dosing regimen.

[0130] In embodiments, the iRNA (e.g., dsRNA) or composition comprising the iRNA is administered repeatedly, e.g., according to a dosing regimen.

[0131] In embodiments, the iRNA (e.g., dsRNA) or composition comprising the iRNA is administered subcutaneously. In embodiments, the iRNA is in the form of a GalNAc conjugate. In embodiments, the iRNA (e.g., the dsRNA) is administered at a dose of 0.5-50 mg/kg. In embodiments, the iRNA (e.g., dsRNA) is in the form of a GalNAc conjugate and is administered at a dose of 1 to 10 mg/kg.

[0132] In an aspect provided herein is a vector encoding at least one strand of an iRNA (e.g., a dsRNA) as described herein.

[0133] In an aspect provided herein is a vector encoding at least one strand of a dsRNA, wherein said dsRNA comprises a region of complementarity to at least a part of an mRNA encoding LECT2, wherein said dsRNA is 30 base pairs or less in length, and wherein said dsRNA targets said mRNA for cleavage.

[0134] In embodiments, the region of complementarity is at least 15 nucleotides in length.

[0135] In embodiments, the region of complementarity is 19 to 21 nucleotides in length.

[0136] In one aspect, a vector is provided for inhibiting the expression of a LECT2 gene in a cell. In one embodiment, the vector comprises an iRNA as described herein. In one embodiment, the vector includes at least one regulatory sequence operably linked to a nucleotide sequence that encodes at least one strand of an iRNA as described herein. In one embodiment the vector comprises at least one strand of a LECT2 iRNA.

[0137] In an aspect provided herein is a cell comprising a vector as described herein.

[0138] In an aspect provided herein is a cell containing a vector for inhibiting the expression of a LECT2 gene in a cell. The vector includes a regulatory sequence operably linked to a nucleotide sequence that encodes at least one strand of an iRNA described herein.

[0139] All publications, patent applications, patents, and other references mentioned herein are incorporated by reference in their entirety.

[0140] The details of various embodiments of the invention are set forth in the description below. Other features, objects, and advantages of the invention will be apparent from the description and the drawings, and from the claims.

### DESCRIPTION OF THE DRAWINGS

[0141] FIG. 1 depicts a human LECT2 mRNA transcript sequence (Ref. Seq. NM_002302.2 GI:59806344, record dated Apr. 17, 2013; SEQ ID NO: 1).

### DETAILED DESCRIPTION OF THE INVENTION

[0142] iRNA directs the sequence-specific degradation of mRNA through a process known as RNA interference (RNAi). Described herein are iRNAs and methods of using them for modulating (e.g., inhibiting) the expression of a LECT2 gene. Also provided are compositions and methods for treatment of disorders related to LECT2 expression, such as amyloidosis (e.g., LECT2 amyloidosis).

[0143] The iRNAs of the compositions featured herein include an RNA strand (the antisense strand) having a region which is 30 nucleotides or less in length, i.e., 15-30 nucleotides in length, generally 19-24 nucleotides in length, which region is substantially complementary to at least part of an mRNA transcript of a LECT2 gene (also referred to herein as an “LECT2-specific iRNA”). The use of such an iRNA enables the targeted degradation of mRNAs of genes that are implicated in disorders related to LECT2 expression, as described herein. Very low dosages of LECT2-specific iRNAs can specifically and efficiently mediate RNAi, resulting in significant inhibition of expression of a LECT2 gene. iRNAs targeting LECT2 can specifically and efficiently mediate RNAi, resulting in significant inhibition of expression of a LECT2 gene, which can be assessed, e.g., in cell based assays.

[0144] The following description discloses how to make and use compositions containing iRNAs to modulate (e.g., inhibit) the expression of a LECT2 gene, as well as compositions and methods for treating disorders related to expression of a LECT2 gene.

[0145] Embodiments of the pharmaceutical compositions featured herein include an iRNA having an antisense strand comprising a region which is 30 nucleotides or less in length, generally 19-24 nucleotides in length, which region is substantially complementary to at least part of an RNA transcript of a LECT2 gene.

[0146] In some aspects, pharmaceutical compositions containing a LECT2 iRNA and a pharmaceutically acceptable carrier, methods of using the compositions to inhibit expression of a LECT2 gene, and methods of using the pharmaceutical compositions to treat disorders related to expression of a LECT2 gene (e.g., LECT2 amyloidosis) are featured herein.

### I. Definitions

[0147] For convenience, the meaning of certain terms and phrases used in the specification, examples, and appended claims, are provided below. If there is an apparent discrepancy between the usage of a term in other parts of this specification and its definition provided in this section, the definition in this section shall prevail.

[0148] As used herein, “LECT2” refers to leukocyte chemotactic factor 2 (also known as leukocyte cell-derived chemotaxin 2, chondromodulin-II, chm-II or chm2). See, e.g., Yamagoe S et al. Genomics, 1998 Mar. 15; 48(3):324-9. LECT2 was first identified as a novel neutrophil chemotactic protein and is identical with chondromodulin II, a growth stimulator for chondrocytes and osteoblasts. The human LECT2 gene was mapped to chromosome 5q31.1-q32. Ibid.

[0149] The sequence of a human LECT2 mRNA transcript can be found at NM_002302.2 (SEQ ID NO: 1). The sequence of a mouse LECT2 mRNA can be found at NM_010702.1 and at NM_010702.2, and the sequence of a rat LECT2 mRNA can be found at NM_001108405.1.

[0150] The human LECT2 protein is a secreted, 16 kDa protein. The LECT2 protein is secreted by the liver. It has high sequence similarity to the chondromodulin repeat regions of the chicken myb-induced myeloid 1 protein (http://www.genecards.org/cgi-bin/carddisp.pl?gene=LECT2; accessed Aug. 29, 2013). Polymorphism in the LECT2 gene has been associated with rheumatoid arthritis. Ibid.

[0151] LECT2 is expressed in various tissues, including the brain and stomach as well as the liver. Koshimizu, Y & Ohtomi, M. (2010) Brain Res. 1311:1-11. In a study using indirect immunoperoxidase staining to investigate the expression of LECT2 in normal and diseased human organs and tissues other than liver, it was found that LECT2 was generally expressed in vascular, endothelial and smooth muscle cells, adipocytes, cerebral nerve cells, apical squamous epithelia, parathyroid cells, sweat and sebaceous glandular epithelia, Hassall bodies and some mononuclear cells in immunohematopoeietic tissue. This protein was generally negative, although occasionally positively stained in osteoblasts, chondrocytes, cardiac and skeletal muscle cells, smooth muscle cells of the gastrointestinal tract, and the epithelial cells of some tissues. Nagai et al. (1998) Pathol Int. 48(11):882-6.

[0152] The human LECT2 gene codes for 151 amino acids including an 18 amino acid signal peptide. The secreted protein has 133 residues. A G/A polymorphism at nucleotide 172 in exon 3 of the gene (codon change GTC to ATC) has been identified and accounts for the presence of either valine or isoleucine at position 58 of the unprocessed protein (or position 40 of the mature protein). The G allele has an overall frequency of 0.477 and a frequency range of 0.6-0.7 in individuals of European descent. See Benson, M. D. et al. (2008) Kidney International, 74: 218-222; Murphy, C. L. et al. (2010) Am J Kidney Dis, 56(6):1100-1107. Patients with LECT2 amyloidosis typically are homozygous for the G allele. Without wishing to be bound by theory, it has been suggested that replacement of the buried isoleucine (A allele) side chain with valine (G allele) could destabilize the protein and possibly account for the amyloidogenic propensity of this LECT2 variant. Murphy, C. L. et al. (2010) Am J Kidney Dis, 56(6):1100-1107.

[0153] As used herein, a “LECT2 amyloidosis” or “ALECT2” includes an amyloidosis involving deposits of amyloid or amyloid fibrils that contain a LECT2 protein (e.g., any polymorphic variant of a LECT2 protein) or a portion of a LECT2 protein. The LECT2 protein can be a variant (e.g., a mutant) LECT2 protein. The amyloidosis can be systemic or local. In embodiments, the LECT2 amyloidosis involves amyloid deposits in the kidney and/or liver.

[0154] “G,” “C,” “A,” “T” and “U” each generally stand for a nucleotide that contains guanine, cytosine, adenine, thymidine and uracil as a base, respectively. However, it will be understood that the term “ribonucleotide” or “nucleotide” can also refer to a modified nucleotide, as further detailed below, or a surrogate replacement moiety. The skilled person is well aware that guanine, cytosine, adenine, and uracil may be replaced by other moieties without substantially altering the base pairing properties of an oligonucleotide comprising a nucleotide bearing such replacement moiety. For example, without limitation, a nucleotide comprising inosine as its base may base pair with nucleotides containing adenine, cytosine, or uracil. Hence, nucleotides containing uracil, guanine, or adenine may be replaced in the nucleotide sequences of dsRNA featured in the invention by a nucleotide containing, for example, inosine. In another example, adenine and cytosine anywhere in the oligonucleotide can be replaced with guanine and uracil, respectively to form G-U Wobble base pairing with the target mRNA. Sequences containing such replacement moieties are suitable for the compositions and methods featured in the invention.

[0155] As used herein, the term “iRNA,” “RNAi”, “iRNA agent,” or “RNAi agent” refers to an agent that contains RNA as that term is defined herein, and which mediates the targeted cleavage of an RNA transcript, e.g., via an RNA-induced silencing complex (RISC) pathway. In one embodiment, an iRNA as described herein effects inhibition of LECT2 expression. Inhibition of ALECT2 expression may be assessed based on a reduction in the level of ALECT2 mRNA or a reduction in the level of the ALECT2 protein. As used herein, “target sequence” refers to a contiguous portion of the nucleotide sequence of an mRNA molecule formed during the transcription of an ALECT2 gene, including mRNA that is a product of RNA processing of a primary transcription product. The target portion of the sequence will be at least long enough to serve as a substrate for iRNA-directed cleavage at or near that portion. For example, the target sequence will generally be from 9-36 nucleotides in length, e.g., 15-30 nucleotides in length, including all sub-ranges therebetween. As non-limiting examples, the target sequence can be from 15-30 nucleotides, 15-26 nucleotides, 15-23 nucleotides, 15-22 nucleotides, 15-21 nucleotides, 15-20 nucleotides, 15-19 nucleotides, 15-18 nucleotides, 15-17 nucleotides, 18-30 nucleotides, 18-26 nucleotides, 18-23 nucleotides, 18-22 nucleotides, 18-21 nucleotides, 18-20 nucleotides, 19-30 nucleotides, 19-26 nucleotides, 19-23 nucleotides, 19-22 nucleotides, 19-21 nucleotides, 19-20 nucleotides, 20-30 nucleotides, 20-26 nucleotides, 20-25 nucleotides, 20-24 nucleotides, 20-23 nucleotides, 20-22 nucleotides, 20-21 nucleotides, 21-30 nucleotides, 21-26 nucleotides, 21-25 nucleotides, 21-24 nucleotides, 21-23 nucleotides, or 21-22 nucleotides.

[0156] As used herein, the term “strand comprising a sequence” refers to an oligonucleotide comprising a chain of nucleotides that is described by the sequence referred to using the standard nucleotide nomenclature.

[0157] As used herein, and unless otherwise indicated, the term “complementary,” when used to describe a first nucleotide sequence in relation to a second nucleotide sequence, refers to the ability of an oligonucleotide or polynucleotide comprising the first nucleotide sequence to hybridize and form a duplex structure under certain conditions with an oligonucleotide or polynucleotide comprising the second nucleotide sequence, as will be understood by the skilled person. Such conditions can, for example, be stringent conditions, where stringent conditions may include: 400 mM NaCl, 40 mM PIPES pH 6.4, 1 mM EDTA, 50° C. or 70° C. for 12-16 hours followed by washing. Other conditions, such as physiologically relevant conditions as may be encountered inside an organism, can apply. The skilled person will be able to determine the set of conditions most appropriate for a test of complementarity of two sequences in accordance with the ultimate application of the hybridized nucleotides.

[0158] Complementary sequences within an iRNA, e.g., within a dsRNA as described herein, include base-pairing of the oligonucleotide or polynucleotide comprising a first nucleotide sequence to an oligonucleotide or polynucleotide comprising a second nucleotide sequence over the entire length of one or both nucleotide sequences. Such sequences can be referred to as “fully complementary” with respect to each other herein. However, where a first sequence is referred to as “substantially complementary” with respect to a second sequence herein, the two sequences can be fully complementary, or they may form one or more, but generally not more than 5, 4, 3 or 2 mismatched base pairs upon hybridization for a duplex up to 30 base pairs, while retaining the ability to hybridize under the conditions most relevant to their ultimate application, e.g., inhibition of gene expression via a RISC pathway. However, where two oligonucleotides are designed to form, upon hybridization, one or more single stranded overhangs, such overhangs shall not be regarded as mismatches with regard to the determination of complementarity. For example, a dsRNA comprising one oligonucleotide 21 nucleotides in length and another oligonucleotide 23 nucleotides in length, wherein the longer oligonucleotide comprises a sequence of 21 nucleotides that is fully complementary to the shorter oligonucleotide, may yet be referred to as “fully complementary” for the purposes described herein.

[0159] “Complementary” sequences, as used herein, may also include, or be formed entirely from, non-Watson-Crick base pairs and/or base pairs formed from non-natural and modified nucleotides, in as far as the above requirements with respect to their ability to hybridize are fulfilled. Such non-Watson-Crick base pairs includes, but are not limited to, G:U Wobble or Hoogstein base pairing.

[0160] The terms “complementary,” “fully complementary” and “substantially complementary” herein may be used with respect to the base matching between the sense strand and the antisense strand of a dsRNA, or between the antisense strand of an iRNA agent and a target sequence, as will be understood from the context of their use.

[0161] As used herein, a polynucleotide that is “substantially complementary to at least part of” a messenger RNA (mRNA) refers to a polynucleotide that is substantially complementary to a contiguous portion of the mRNA of interest (e.g., an mRNA encoding an ALECT2 protein). For example, a polynucleotide is complementary to at least a part of a LECT2 mRNA if the sequence is substantially complementary to a non-interrupted portion of an mRNA encoding LECT2. As another example, a polynucleotide is complementary to at least a part of a LECT2 mRNA if the sequence is substantially complementary to a non-interrupted portion of an mRNA encoding LECT2.

[0162] The term “double-stranded RNA” or “dsRNA,” as used herein, refers to an iRNA that includes an RNA molecule or complex of molecules having a hybridized duplex region that comprises two anti-parallel and substantially complementary nucleic acid strands, which will be referred to as having “sense” and “antisense” orientations with respect to a target RNA. The duplex region can be of any length that permits specific degradation of a desired target RNA, e.g., through a RISC pathway, but will typically range from 9 to 36 base pairs in length, e.g., 15-30 base pairs in length. Considering a duplex between 9 and 36 base pairs, the duplex can be any length in this range, for example, 9, 10, 11, 12, 13, 14, 15, 16, 17, 18, 19, 20, 21, 22, 23, 24, 25, 26, 27, 28, 29, 30, 31, 32, 33, 34, 35, or 36 and any sub-range therein between, including, but not limited to 15-30 base pairs, 15-26 base pairs, 15-23 base pairs, 15-22 base pairs, 15-21 base pairs, 15-20 base pairs, 15-19 base pairs, 15-18 base pairs, 15-17 base pairs, 18-30 base pairs, 18-26 base pairs, 18-23 base pairs, 18-22 base pairs, 18-21 base pairs, 18-20 base pairs, 19-30 base pairs, 19-26 base pairs, 19-23 base pairs, 19-22 base pairs, 19-21 base pairs, 19-20 base pairs, 20-30 base pairs, 20-26 base pairs, 20-25 base pairs, 20-24 base pairs, 20-23 base pairs, 20-22 base pairs, 20-21 base pairs, 21-30 base pairs, 21-26 base pairs, 21-25 base pairs, 21-24 base pairs, 21-23 base pairs, or 21-22 base pairs. dsRNAs generated in the cell by processing with Dicer and similar enzymes are generally in the range of 19-22 base pairs in length. One strand of the duplex region of a dsDNA comprises a sequence that is substantially complementary to a region of a target RNA. The two strands forming the duplex structure can be from a single RNA molecule having at least one self-complementary region, or can be formed from two or more separate RNA molecules. Where the duplex region is formed from two strands of a single molecule, the molecule can have a duplex region separated by a single stranded chain of nucleotides (herein referred to as a “hairpin loop”) between the 3′-end of one strand and the 5′-end of the respective other strand forming the duplex structure. The hairpin loop can comprise at least one unpaired nucleotide; in some embodiments the hairpin loop can comprise at least 3, at least 4, at least 5, at least 6, at least 7, at least 8, at least 9, at least 10, at least 20, at least 23 or more unpaired nucleotides. Where the two substantially complementary strands of a dsRNA are comprised by separate RNA molecules, those molecules need not, but can be covalently connected. Where the two strands are connected covalently by means other than a hairpin loop, the connecting structure is referred to as a “linker.” The term “siRNA” is also used herein to refer to a dsRNA as described above.

[0163] In another embodiment, the iRNA agent may be a “single-stranded siRNA” that is introduced into a cell or organism to inhibit a target mRNA. Single-stranded RNAi agents bind to the RISC endonuclease Argonaute 2, which then cleaves the target mRNA. The single-stranded siRNAs are generally 15-30 nucleotides and are chemically modified. The design and testing of single-stranded siRNAs are described in U.S. Pat. No. 8,101,348 and in Lima et al., (2012) Cell 150: 883-894, the entire contents of each of which are hereby incorporated herein by reference. Any of the antisense nucleotide sequences described herein (e.g., sequences provided in Tables 2-5) may be used as a single-stranded siRNA as described herein or as chemically modified by the methods described in Lima et al., (2012) Cell 150; 883-894.

[0164] The skilled artisan will recognize that the term “RNA molecule” or “ribonucleic acid molecule” encompasses not only RNA molecules as expressed or found in nature, but also analogs and derivatives of RNA comprising one or more ribonucleotide/ribonucleoside analogs or derivatives as described herein or as known in the art. Strictly speaking, a “ribonucleoside” includes a nucleoside base and a ribose sugar, and a “ribonucleotide” is a ribonucleoside with one, two or three phosphate moieties. However, the terms “ribonucleoside” and “ribonucleotide” can be considered to be equivalent as used herein. The RNA can be modified in the nucleobase structure, in the ribose structure, or in the ribose-phosphate backbone structure, e.g., as described herein below. However, the molecules comprising ribonucleoside analogs or derivatives must retain the ability to form a duplex. As non-limiting examples, an RNA molecule can also include at least one modified ribonucleoside including but not limited to a 2′-O-methyl modified nucleoside, a nucleoside comprising a 5′ phosphorothioate group, a terminal nucleoside linked to a cholesteryl derivative or dodecanoic acid bisdecylamide group, a locked nucleoside, an abasic nucleoside, an acyclic nucleoside, a 2′-deoxy-2′-fluoro modified nucleoside, a 2′-amino-modified nucleoside, 2′-alkyl-modified nucleoside, morpholino nucleoside, a phosphoramidate or a non-natural base comprising nucleoside, or any combination thereof. Alternatively, an RNA molecule can comprise at least two modified ribonucleosides, at least 3, at least 4, at least 5, at least 6, at least 7, at least 8, at least 9, at least 10, at least 15, at least 20 or more, up to the entire length of the dsRNA molecule. The modifications need not be the same for each of such a plurality of modified ribonucleosides in an RNA molecule. In one embodiment, modified RNAs contemplated for use in methods and compositions described herein are peptide nucleic acids (PNAs) that have the ability to form the required duplex structure and that permit or mediate the specific degradation of a target RNA, e.g., via a RISC pathway.

[0165] In one aspect, a modified ribonucleoside includes a deoxyribonucleoside. In such an instance, an iRNA agent can comprise one or more deoxynucleosides, including, for example, a deoxynucleoside overhang(s), or one or more deoxynucleosides within the double stranded portion of a dsRNA. In certain embodiments, the RNA molecule comprises a percentage of deoxyribonucleoses of at least 5, 10, 15, 20, 25, 30, 35, 40, 45, 50, 55, 60, 65, 70, 75, 80, 85, 90, 95% or higher (but not 100%) deoxyribonucleosides, e.g., in one or both strands. In other embodiments, the term “iRNA” does not encompass a double stranded DNA molecule (e.g., a naturally-occurring double stranded DNA molecule or a 100% deoxynucleoside-containing DNA molecule).

[0166] In one aspect, an RNA interference agent includes a single stranded RNA that interacts with a target RNA sequence to direct the cleavage of the target RNA. Without wishing to be bound by theory, long double stranded RNA introduced into cells is broken down into siRNA by a Type III endonuclease known as Dicer (Sharp et al., Genes Dev. 2001, 15:485). Dicer, a ribonuclease-III-like enzyme, processes the dsRNA into 19-23 base pair short interfering RNAs with characteristic two base 3′ overhangs (Bernstein, et al., (2001) Nature 409:363). The siRNAs are then incorporated into an RNA-induced silencing complex (RISC) where one or more helicases unwind the siRNA duplex, enabling the complementary antisense strand to guide target recognition (Nykanen, et al., (2001) Cell 107:309). Upon binding to the appropriate target mRNA, one or more endonucleases within the RISC cleaves the target to induce silencing (Elbashir, et al., (2001) Genes Dev. 15:188). Thus, in one aspect the invention relates to a single stranded RNA that promotes the formation of a RISC complex to effect silencing of the target gene.

[0167] As used herein, the term “nucleotide overhang” refers to at least one unpaired nucleotide that protrudes from the duplex structure of an iRNA, e.g., a dsRNA. For example, when a 3′-end of one strand of a dsRNA extends beyond the 5′-end of the other strand, or vice versa, there is a nucleotide overhang. A dsRNA can comprise an overhang of at least one nucleotide; alternatively the overhang can comprise at least two nucleotides, at least three nucleotides, at least four nucleotides, at least five nucleotides or more. A nucleotide overhang can comprise or consist of a nucleotide/nucleoside analog, including a deoxynucleotide/nucleoside. The overhang(s) may be on the sense strand, the antisense strand or any combination thereof. Furthermore, the nucleotide(s) of an overhang can be present on the 5′ end, 3′ end or both ends of either an antisense or sense strand of a dsRNA.

[0168] In one embodiment, the antisense strand of a dsRNA has a 1-10 nucleotide overhang at the 3′ end and/or the 5′ end. In one embodiment, the sense strand of a dsRNA has a 1-10 nucleotide overhang at the 3′ end and/or the 5′ end. In another embodiment, one or more of the nucleotides in the overhang is replaced with a nucleoside thiophosphate.

[0169] The terms “blunt” or “blunt ended” as used herein in reference to a dsRNA mean that there are no unpaired nucleotides or nucleotide analogs at a given terminal end of a dsRNA, i.e., no nucleotide overhang. One or both ends of a dsRNA can be blunt. Where both ends of a dsRNA are blunt, the dsRNA is said to be blunt ended. To be clear, a “blunt ended” dsRNA is a dsRNA that is blunt at both ends, i.e., no nucleotide overhang at either end of the molecule. Most often such a molecule will be double-stranded over its entire length.

[0170] The term “antisense strand” or “guide strand” refers to the strand of an iRNA, e.g., a dsRNA, which includes a region that is substantially complementary to a target sequence. As used herein, the term “region of complementarity” refers to the region on the antisense strand that is substantially complementary to a sequence, for example a target sequence, as defined herein. Where the region of complementarity is not fully complementary to the target sequence, the mismatches may be in the internal or terminal regions of the molecule. Generally, the most tolerated mismatches are in the terminal regions, e.g., within 5, 4, 3, or 2 nucleotides of the 5′ and/or 3′ terminus.

[0171] The term “sense strand” or “passenger strand” as used herein, refers to the strand of an iRNA that includes a region that is substantially complementary to a region of the antisense strand as that term is defined herein.

[0172] As used herein, the term “SNALP” refers to a stable nucleic acid-lipid particle. A SNALP represents a vesicle of lipids coating a reduced aqueous interior comprising a nucleic acid such as an iRNA or a plasmid from which an iRNA is transcribed. SNALPs are described, e.g., in U.S. Patent Application Publication Nos. 2006/0240093, 2007/0135372, and in International Application No. WO 2009/082817. These applications are incorporated herein by reference in their entirety.

[0173] “Introducing into a cell,” when referring to an iRNA, means facilitating or effecting uptake or absorption into the cell, as is understood by those skilled in the art. Absorption or uptake of an iRNA can occur through unaided diffusive or active cellular processes, or by auxiliary agents or devices. The meaning of this term is not limited to cells in vitro; an iRNA may also be “introduced into a cell,” wherein the cell is part of a living organism. In such an instance, introduction into the cell will include the delivery to the organism. For example, for in vivo delivery, iRNA can be injected into a tissue site or administered systemically. In vivo delivery can also be by a β-glucan delivery system, such as those described in U.S. Pat. Nos. 5,032,401 and 5,607,677, and U.S. Publication No. 2005/0281781, which are hereby incorporated by reference in their entirety. In vitro introduction into a cell includes methods known in the art such as electroporation and lipofection. Further approaches are described herein below or known in the art.

[0174] As used herein, the term “modulate the expression of,” refers to at an least partial “inhibition” or partial “activation” of a LECT2 gene expression in a cell treated with an iRNA composition as described herein compared to the expression of LECT2 in a control cell. A control cell includes an untreated cell, or a cell treated with a non-targeting control iRNA.

[0175] The terms “activate,” “enhance,” “up-regulate the expression of,” “increase the expression of,” and the like, in so far as they refer to a LECT2 gene, herein refer to the at least partial activation of the expression of a LECT2 gene, as manifested by an increase in the amount of LECT2 mRNA, which may be isolated from or detected in a first cell or group of cells in which a LECT2 gene is transcribed and which has or have been treated such that the expression of a LECT2 gene is increased, as compared to a second cell or group of cells substantially identical to the first cell or group of cells but which has or have not been so treated (control cells).

[0176] In one embodiment, expression of a LECT2 gene is activated by at least about 10%, 15%, 20%, 25%, 30%, 35%, 40%, 45%, or 50% by administration of an iRNA as described herein. In some embodiments, a LECT2 gene is activated by at least about 60%, 70%, or 80% by administration of an iRNA featured in the invention. In some embodiments, expression of a LECT2 gene is activated by at least about 85%, 90%, or 95% or more by administration of an iRNA as described herein. In some embodiments, the LECT2 gene expression is increased by at least 1-fold, at least 2-fold, at least 5-fold, at least 10-fold, at least 50-fold, at least 100-fold, at least 500-fold, at least 1000 fold or more in cells treated with an iRNA as described herein compared to the expression in an untreated cell. Activation of expression by small dsRNAs is described, for example, in Li et al., 2006 Proc. Natl. Acad. Sci. U.S.A. 103:17337-42, and in US2007/0111963 and US2005/226848, each of which is incorporated herein by reference.

[0177] The terms “silence,” “inhibit expression of,” “down-regulate expression of,” “suppress expression of,” and the like, in so far as they refer to a LECT2 gene, herein refer to the at least partial suppression of the expression of a LECT2 gene, as assessed, e.g., based on LECT2 mRNA expression, LECT2 protein expression, or another parameter functionally linked to LECT2 gene expression. For example, inhibition of LECT2 expression may be manifested by a reduction of the amount of LECT2 mRNA which may be isolated from or detected in a first cell or group of cells in which a LECT2 gene is transcribed and which has or have been treated such that the expression of a LECT2 gene is inhibited, as compared to a control. The control may be a second cell or group of cells substantially identical to the first cell or group of cells, except that the second cell or group of cells have not been so treated (control cells). The degree of inhibition is usually expressed as a percentage of a control level, e.g.,

$$\frac{( mRNA in control cells ) - ( mRNA in treated cells )}{( mRNA in control cells )} \cdot 100 \%$$

[0178] Alternatively, the degree of inhibition may be given in terms of a reduction of a parameter that is functionally linked to LECT2 gene expression, e.g., the amount of protein encoded by a LECT2 gene. The reduction of a parameter functionally linked to LECT2 gene expression may similarly be expressed as a percentage of a control level. In principle, LECT2 gene silencing may be determined in any cell expressing LECT2, either constitutively or by genomic engineering, and by any appropriate assay.

[0179] For example, in certain instances, expression of a LECT2 gene is suppressed by at least about 10%, 15%, 20%, 25%, 30%, 35%, 40%, 45%, or 50% by administration of an iRNA disclosed herein. In some embodiments, a LECT2 gene is suppressed by at least about 60%, 65%, 70%, 75%, or 80% by administration of an iRNA disclosed herein. In some embodiments, a LECT2 gene is suppressed by at least about 85%, 90%, 95%, 98%, 99%, or more by administration of an iRNA as described herein.

[0180] In the context of the present disclosure, the terms “treat,” “treatment,” and the like mean to prevent, relieve or alleviate at least one symptom associated with a disorder related to LECT2 expression, or to slow or reverse the progression or anticipated progression of such a disorder. For example, the methods featured herein, when employed to treat a LECT2 amyloidosis, may serve to inhibit amyloid deposition, to reduce or prevent one or more symptoms of the amyloidosis, or to reduce the risk or severity of associated conditions (e.g., nephrotic syndrome or hepatitis). Thus, unless the context clearly indicates otherwise, the terms “treat,” “treatment,” and the like are intended to encompass prophylaxis, e.g., prevention of disorders and/or symptoms of disorders related to LECT2 expression.

[0181] By “lower” in the context of a disease marker or symptom is meant any decrease, e.g., a statistically or clinically significant decrease in such level. The decrease can be, for example, at least 10%, at least 20%, at least 30%, at least 40%, at least 40%, at least 50%, at least 60%, at least 70%, at least 80%, or at least 90%. The decrease can be down to a level accepted as within the range of normal for an individual without such disorder.

[0182] As used herein, the phrases “therapeutically effective amount” and “prophylactically effective amount” and the like refer to an amount that provides a therapeutic benefit in the treatment, prevention, or management of any disorder or pathological process related to LECT2 expression. The specific amount that is therapeutically effective may vary depending on factors known in the art, such as, for example, the type of disorder or pathological process, the patient's history and age, the stage of the disorder or pathological process, and the administration of other therapies.

[0183] As used herein, a “pharmaceutical composition” comprises a pharmacologically effective amount of an iRNA and a pharmaceutically acceptable carrier. As used herein, “pharmacologically effective amount,” “therapeutically effective amount” or simply “effective amount” refers to that amount of an iRNA effective to produce the intended pharmacological, therapeutic or preventive result. For example, in a method of treating a disorder related to LECT2 expression (e.g., a LECT2 amyloidosis), an effective amount includes an amount effective to reduce one or more symptoms associated with the LECT2 amyloidosis, an amount effective to inhibit amyloid deposition (e.g., LECT2 amyloid deposition), or an amount effective to reduce the risk of developing conditions associated with LECT2 amyloidosis. For example, if a given clinical treatment is considered effective when there is at least a 10% reduction in a measurable parameter associated with a disease or disorder, a therapeutically effective amount of a drug for the treatment of that disease or disorder is the amount necessary to obtain at least a 10% reduction in that parameter. For example, a therapeutically effective amount of an iRNA targeting LECT2 can reduce a level of LECT2 mRNA or a level of LECT2 protein by any measurable amount, e.g., by at least 10%, 20%, 30%, 40% or 50%.

[0184] The term “pharmaceutically acceptable carrier” refers to a carrier for administration of a therapeutic agent. Such carriers include, but are not limited to, saline, buffered saline, dextrose, water, glycerol, ethanol, and combinations thereof. The term specifically excludes cell culture medium. For drugs administered orally, pharmaceutically acceptable carriers include, but are not limited to pharmaceutically acceptable excipients such as inert diluents, disintegrating agents, binding agents, lubricating agents, sweetening agents, flavoring agents, coloring agents and preservatives. Suitable inert diluents include sodium and calcium carbonate, sodium and calcium phosphate, and lactose, while corn starch and alginic acid are suitable disintegrating agents. Binding agents may include starch and gelatin, while the lubricating agent, if present, will generally be magnesium stearate, stearic acid or talc. If desired, the tablets may be coated with a material such as glyceryl monostearate or glyceryl distearate, to delay absorption in the gastrointestinal tract. Agents included in drug formulations are described further herein below.

[0185] The term “about” when referring to a number or a numerical range means that the number or numerical range referred to is an approximation within experimental variability (or within statistical experimental error), and thus the number or numerical range may vary from, for example, between 1% and 15% of the stated number or numerical range.

### II. iRNA Agents

[0186] Described herein are iRNA agents that modulate (e.g., inhibit) the expression of a LECT2 gene.

[0187] In some embodiments, the iRNA agent activates the expression of a LECT2 gene in a cell or mammal.

[0188] In some embodiments, the iRNA agent includes double-stranded ribonucleic acid (dsRNA) molecules for inhibiting the expression of a LECT2 gene in a cell or in a subject (e.g., in a mammal, e.g., in a human), where the dsRNA includes an antisense strand having a region of complementarity which is complementary to at least a part of an mRNA formed in the expression of a LECT2 gene, and where the region of complementarity is 30 nucleotides or less in length, generally 19-24 nucleotides in length, and where the dsRNA, upon contact with a cell expressing the LECT2 gene, inhibits the expression of the LECT2 gene, e.g., by at least 10%, 20%, 30%, 40%, or 50%.

[0189] The modulation (e.g., inhibition) of expression of the LECT2 gene can be assayed by, for example, a PCR or branched DNA (bDNA)-based method, or by a protein-based method, such as by Western blot. Expression of a LECT2 gene in cell culture, such as in COS cells, HeLa cells, primary hepatocytes, HepG2 cells, primary cultured cells or in a biological sample from a subject can be assayed by measuring LECT2 mRNA levels, such as by bDNA or TaqMan assay, or by measuring protein levels, such as by immunofluorescence analysis, using, for example, Western Blotting or flow cytometric techniques.

[0190] A dsRNA includes two RNA strands that are sufficiently complementary to hybridize to form a duplex structure under conditions in which the dsRNA will be used. One strand of a dsRNA (the antisense strand) includes a region of complementarity that is substantially complementary, and generally fully complementary, to a target sequence, derived from the sequence of an mRNA formed during the expression of a LECT2 gene. The other strand (the sense strand) includes a region that is complementary to the antisense strand, such that the two strands hybridize and form a duplex structure when combined under suitable conditions. Generally, the duplex structure is between 15 and 30 inclusive, more generally between 18 and 25 inclusive, yet more generally between 19 and 24 inclusive, and most generally between 19 and 21 base pairs in length, inclusive. Similarly, the region of complementarity to the target sequence is between 15 and 30 inclusive, more generally between 18 and 25 inclusive, yet more generally between 19 and 24 inclusive, and most generally between 19 and 21 nucleotides in length, inclusive.

[0191] In some embodiments, the dsRNA is between 15 and 20 nucleotides in length, inclusive, and in other embodiments, the dsRNA is between 25 and 30 nucleotides in length, inclusive. As the ordinarily skilled person will recognize, the targeted region of an RNA targeted for cleavage will most often be part of a larger RNA molecule, often an mRNA molecule. Where relevant, a “part” of an mRNA target is a contiguous sequence of an mRNA target of sufficient length to be a substrate for RNAi-directed cleavage (i.e., cleavage through a RISC pathway). dsRNAs having duplexes as short as 9 base pairs can, under some circumstances, mediate RNAi-directed RNA cleavage. Most often a target will be at least 15 nucleotides in length, e.g., 15-30 nucleotides in length.

[0192] One of skill in the art will also recognize that the duplex region is a primary functional portion of a dsRNA, e.g., a duplex region of 9 to 36, e.g., 15-30 base pairs. Thus, in one embodiment, to the extent that it becomes processed to a functional duplex of e.g., 15-30 base pairs that targets a desired RNA for cleavage, an RNA molecule or complex of RNA molecules having a duplex region greater than 30 base pairs is a dsRNA. Thus, an ordinarily skilled artisan will recognize that in one embodiment, then, an miRNA is a dsRNA. In another embodiment, a dsRNA is not a naturally occurring miRNA. In another embodiment, an iRNA agent useful to target LECT2 expression is not generated in the target cell by cleavage of a larger dsRNA.

[0193] A dsRNA as described herein may further include one or more single-stranded nucleotide overhangs. The dsRNA can be synthesized by standard methods known in the art as further discussed below, e.g., by use of an automated DNA synthesizer, such as are commercially available from, for example, Biosearch, Applied Biosystems, Inc.

[0194] In one embodiment, a LECT2 gene is a human LECT2 gene. In another embodiment the LECT2 gene is a mouse or a rat LECT2 gene.

[0195] In specific embodiments, the dsRNA comprises a sense strand that comprises or consists of a sense sequence selected from the sense sequences provided in Tables 2 and 3, and an antisense strand that comprises or consists of an antisense sequence selected from the antisense sequences provided in Tables 2 and 3.

[0196] In one aspect, a dsRNA will include at least sense and antisense nucleotide sequences, whereby the sense strand is selected from the sequences provided in Tables 2 and 3, and the corresponding antisense strand is selected from the sequences provided in Tables 2 and 3.

[0197] In these aspects, one of the two sequences is complementary to the other of the two sequences, with one of the sequences being substantially complementary to a sequence of an mRNA generated by the expression of a LECT2 gene. As such, a dsRNA will include two oligonucleotides, where one oligonucleotide is described as the sense strand, and the second oligonucleotide is described as the corresponding antisense strand. As described elsewhere herein and as known in the art, the complementary sequences of a dsRNA can also be contained as self-complementary regions of a single nucleic acid molecule, as opposed to being on separate oligonucleotides.

[0198] The skilled person is well aware that dsRNAs having a duplex structure of between 20 and 23, but specifically 21, base pairs have been hailed as particularly effective in inducing RNA interference (Elbashir et al., EMBO 2001, 20:6877-6888). However, others have found that shorter or longer RNA duplex structures can be effective as well.

[0199] In the embodiments described above, by virtue of the nature of the oligonucleotide sequences provided in Tables 2 and 3, dsRNAs described herein can include at least one strand of a length of minimally 19 nucleotides. It can be reasonably expected that shorter duplexes having one of the sequences of Tables 2 and 3 minus only a few nucleotides on one or both ends will be similarly effective as compared to the dsRNAs described above.

[0200] In some embodiments, the dsRNA has a partial sequence of at least 15, 16, 17, 18, 19, 20, or more contiguous nucleotides from one of the sequences of Tables 2, 3, 4 or 5.

[0201] In some embodiments, the dsRNA has an antisense sequence that comprises at least 15, 16, 17, 18, or 19 contiguous nucleotides of an antisense sequence provided in Table 2 and a sense sequence that comprises at least 15, 16, 17, 18, or 19 contiguous nucleotides of a corresponding sense sequence provided in Table 2.

[0202] In some embodiments, the dsRNA comprises an antisense sequence that comprises at least 15, 16, 17, 18, 19, 20, 21, 22, or 23 contiguous nucleotides of an antisense sequence provided in Table 3 and a sense sequence that comprises at least 15, 16, 17, 18, 19, 20, or 21 contiguous nucleotides of a corresponding sense sequence provided in Table 3.

[0203] In some embodiments, the dsRNA comprises an antisense sequence that comprises at least 15, 16, 17, 18, 19, 20, 21, 22, or 23 contiguous nucleotides of an antisense sequence provided in Table 4 and a sense sequence that comprises at least 15, 16, 17, 18, 19, 20, or 21 contiguous nucleotides of a corresponding sense sequence provided in Table 4.

[0204] In some embodiments, the dsRNA comprises an antisense sequence that comprises at least 15, 16, 17, 18, 19, 20, 21, 22, or 23 contiguous nucleotides of an antisense sequence provided in Table 5 and a sense sequence that comprises at least 15, 16, 17, 18, 19, 20, or 21 contiguous nucleotides of a corresponding sense sequence provided in Table 5.

[0205] In some such embodiments, the dsRNA, although it comprises only a portion of the sequences provided in Table 2, 3, 5, 6, 9 or 10, is equally effective in inhibiting a level of LECT2 expression as is a dsRNA that comprises the full length sequences provided in Table 2, 3, 4, or 5. In some embodiments, the dsRNA differs in its inhibition of a level of expression of a LECT2 gene by not more than 5, 10, 15, 20, 25, 30, 35, 40, 45, or 50% inhibition compared with a dsRNA comprising the full sequence disclosed herein.

[0206] The iRNAs provided in Tables 2-5 identify a site in a LECT2 transcript that is susceptible to RISC-mediated cleavage. As such, the present invention further features iRNAs that target within one of such sequences. As used herein, an iRNA is said to target within a particular site of an RNA transcript if the iRNA promotes cleavage of the transcript anywhere within that particular site. Such an iRNA will generally include at least 15 contiguous nucleotides from one of the sequences provided in Tables 2-5 coupled to additional nucleotide sequences taken from the region contiguous to the selected sequence in a LECT2 gene.

[0207] While a target sequence is generally 15-30 nucleotides in length, there is wide variation in the suitability of particular sequences in this range for directing cleavage of any given target RNA. Various software packages and the guidelines set out herein provide guidance for the identification of optimal target sequences for any given gene target, but an empirical approach can also be taken in which a “window” or “mask” of a given size (as a non-limiting example, 21 nucleotides) is literally or figuratively (including, e.g., in silico) placed on the target RNA sequence to identify sequences in the size range that may serve as target sequences. By moving the sequence “window” progressively one nucleotide upstream or downstream of an initial target sequence location, the next potential target sequence can be identified, until the complete set of possible sequences is identified for any given target size selected. This process, coupled with systematic synthesis and testing of the identified sequences (using assays described herein or known in the art) to identify those sequences that perform optimally can identify those RNA sequences that, when targeted with an iRNA agent, mediate the best inhibition of target gene expression. Thus, while the sequences identified, for example, in Tables 2 and 3, represent effective target sequences, it is contemplated that further optimization of inhibition efficiency can be achieved by progressively “walking the window” one nucleotide upstream or downstream of the given sequences to identify sequences with equal or better inhibition characteristics.

[0208] Further, it is contemplated that for any sequence identified, e.g., in Tables 2 and 3, further optimization can be achieved by systematically either adding or removing nucleotides to generate longer or shorter sequences and testing those and sequences generated by walking a window of the longer or shorter size up or down the target RNA from that point. Again, coupling this approach to generating new candidate targets with testing for effectiveness of iRNAs based on those target sequences in an inhibition assay as known in the art or as described herein can lead to further improvements in the efficiency of inhibition. Further still, such optimized sequences can be adjusted by, e.g., the introduction of modified nucleotides as described herein or as known in the art, addition or changes in overhang, or other modifications as known in the art and/or discussed herein to further optimize the molecule (e.g., increasing serum stability or circulating half-life, increasing thermal stability, enhancing transmembrane delivery, targeting to a particular location or cell type, increasing interaction with silencing pathway enzymes, increasing release from endosomes, etc.) as an expression inhibitor.

[0209] An iRNA as described herein can contain one or more mismatches to the target sequence. In one embodiment, an iRNA as described herein contains no more than 3 mismatches. If the antisense strand of the iRNA contains mismatches to a target sequence, it is preferable that the area of mismatch not be located in the center of the region of complementarity. If the antisense strand of the iRNA contains mismatches to the target sequence, it is preferable that the mismatch be restricted to be within the last 5 nucleotides from either the 5′ or 3′ end of the region of complementarity. For example, for a 23 nucleotide iRNA agent RNA strand which is complementary to a region of a LECT2 gene, the RNA strand generally does not contain any mismatch within the central 13 nucleotides. The methods described herein or methods known in the art can be used to determine whether an iRNA containing a mismatch to a target sequence is effective in inhibiting the expression of a LECT2 gene. Consideration of the efficacy of iRNAs with mismatches in inhibiting expression of a LECT2 gene is important, especially if the particular region of complementarity in a LECT2 gene is known to have polymorphic sequence variation within the population.

[0210] In one embodiment, at least one end of a dsRNA has a single-stranded nucleotide overhang of 1 to 4, generally 1 or 2 nucleotides. dsRNAs having at least one nucleotide overhang have unexpectedly superior inhibitory properties relative to their blunt-ended counterparts. In yet another embodiment, the RNA of an iRNA (e.g., a dsRNA) is chemically modified to enhance stability or other beneficial characteristics. The nucleic acids featured in the invention may be synthesized and/or modified by methods well established in the art, such as those described in “Current protocols in nucleic acid chemistry,” Beaucage, S. L. et al. (Edrs.), John Wiley & Sons, Inc., New York, NY, USA, which is hereby incorporated herein by reference. Modifications include, for example, (a) end modifications, e.g., 5′ end modifications (phosphorylation, conjugation, inverted linkages, etc.) 3′ end modifications (conjugation, DNA nucleotides, inverted linkages, etc.), (b) base modifications, e.g., replacement with stabilizing bases, destabilizing bases, or bases that base pair with an expanded repertoire of partners, removal of bases (abasic nucleotides), or conjugated bases, (c) sugar modifications (e.g., at the 2′ position or 4′ position, or having an acyclic sugar) or replacement of the sugar, as well as (d) backbone modifications, including modification or replacement of the phosphodiester linkages.

[0211] Specific examples of RNA compounds useful in this invention include, but are not limited to RNAs containing modified backbones or no natural internucleoside linkages. RNAs having modified backbones include, among others, those that do not have a phosphorus atom in the backbone. For the purposes of this specification, and as sometimes referenced in the art, modified RNAs that do not have a phosphorus atom in their internucleoside backbone can also be considered to be oligonucleosides. In particular embodiments, the modified RNA will have a phosphorus atom in its internucleoside backbone.

[0212] Modified RNA backbones include, for example, phosphorothioates, chiral phosphorothioates, phosphorodithioates, phosphotriesters, aminoalkylphosphotriesters, methyl and other alkyl phosphonates including 3′-alkylene phosphonates and chiral phosphonates, phosphinates, phosphoramidates including 3′-amino phosphoramidate and aminoalkylphosphoramidates, thionophosphoramidates, thionoalkylphosphonates, thionoalkylphosphotriesters, and boranophosphates having normal 3′-5′ linkages, 2′-5′ linked analogs of these, and those) having inverted polarity wherein the adjacent pairs of nucleoside units are linked 3′-5′ to 5′-3′ or 2′-5′ to 5′-2′. Various salts, mixed salts and free acid forms are also included.

[0213] Representative U.S. patents that teach the preparation of the above phosphorus-containing linkages include, but are not limited to, U.S. Pat. Nos. 3,687,808; 4,469,863; 4,476,301; 5,023,243; 5,177,195; 5,188,897; 5,264,423; 5,276,019; 5,278,302; 5,286,717; 5,321,131; 5,399,676; 5,405,939; 5,453,496; 5,455,233; 5,466,677; 5,476,925; 5,519,126; 5,536,821; 5,541,316; 5,550,111; 5,563,253; 5,571,799; 5,587,361; 5,625,050; 6,028,188; 6,124,445; 6,160,109; 6,169,170; 6,172,209; 6,239,265; 6,277,603; 6,326,199; 6,346,614; 6,444,423; 6,531,590; 6,534,639; 6,608,035; 6,683,167; 6,858,715; 6,867,294; 6,878,805; 7,015,315; 7,041,816; 7,273,933; 7,321,029; and U.S. Pat. No. RE39464, each of which is herein incorporated by reference.

[0214] Modified RNA backbones that do not include a phosphorus atom therein have backbones that are formed by short chain alkyl or cycloalkyl internucleoside linkages, mixed heteroatoms and alkyl or cycloalkyl internucleoside linkages, or one or more short chain heteroatomic or heterocyclic internucleoside linkages. These include those having morpholino linkages (formed in part from the sugar portion of a nucleoside); siloxane backbones; sulfide, sulfoxide and sulfone backbones; formacetyl and thioformacetyl backbones; methylene formacetyl and thioformacetyl backbones; alkene containing backbones; sulfamate backbones; methyleneimino and methylenehydrazino backbones; sulfonate and sulfonamide backbones; amide backbones; and others having mixed N, O, S and CH₂ component parts.

[0215] Representative U.S. patents that teach the preparation of the above oligonucleosides include, but are not limited to, U.S. Pat. Nos. 5,034,506; 5,166,315; 5,185,444; 5,214,134; 5,216,141; 5,235,033; 5,64,562; 5,264,564; 5,405,938; 5,434,257; 5,466,677; 5,470,967; 5,489,677; 5,541,307; 5,561,225; 5,596,086; 5,602,240; 5,608,046; 5,610,289; 5,618,704; 5,623,070; 5,663,312; 5,633,360; 5,677,437; and, 5,677,439, each of which is herein incorporated by reference.

[0216] In other RNA mimetics suitable or contemplated for use in iRNAs, both the sugar and the internucleoside linkage, i.e., the backbone, of the nucleotide units are replaced with novel groups. The base units are maintained for hybridization with an appropriate nucleic acid target compound. One such oligomeric compound, an RNA mimetic that has been shown to have excellent hybridization properties, is referred to as a peptide nucleic acid (PNA). In PNA compounds, the sugar backbone of an RNA is replaced with an amide containing backbone, in particular an aminoethylglycine backbone. The nucleobases are retained and are bound directly or indirectly to aza nitrogen atoms of the amide portion of the backbone. Representative U.S. patents that teach the preparation of PNA compounds include, but are not limited to, U.S. Pat. Nos. 5,539,082; 5,714,331; and 5,719,262, each of which is herein incorporated by reference. Further teaching of PNA compounds can be found, for example, in Nielsen et al., Science, 1991, 254, 1497-1500.

[0217] Some embodiments featured in the invention include RNAs with phosphorothioate backbones and oligonucleosides with heteroatom backbones, and in particular —CH₂—NH—CH₂—, —CH₂—N(CH₃)—O—CH₂— [known as a methylene (methylimino) or MMI backbone], —CH₂—O—N(CH₃)—CH₂—, —CH₂—N(CH₃)—N(CH₃)—CH₂— and —N(CH₃)—CH₂—CH₂— [wherein the native phosphodiester backbone is represented as —O—P—O—CH₂—] of the above-referenced U.S. Pat. No. 5,489,677, and the amide backbones of the above-referenced U.S. Pat. No. 5,602,240. In some embodiments, the RNAs featured herein have morpholino backbone structures of the above-referenced U.S. Pat. No. 5,034,506.

[0218] Modified RNAs may also contain one or more substituted sugar moieties. The iRNAs, e.g., dsRNAs, featured herein can include one of the following at the 2′ position: OH; F; O-, S-, or N-alkyl; O-, S-, or N-alkenyl; O-, S- or N-alkynyl; or O-alkyl-O-alkyl, wherein the alkyl, alkenyl and alkynyl may be substituted or unsubstituted C₁ to C₁₀ alkyl or C₂ to C₁₀ alkenyl and alkynyl. Exemplary suitable modifications include O[(CH₂)ₙO]ₘCH₃, O(CH₂)_{·n}OCH₃, O(CH₂)ₙNH₂, O(CH₂)ₙCH₃, O(CH₂)ₙONH₂, and O(CH₂)ₙON[(CH₂)ₙCH₃)]₂, where n and m are from 1 to about 10. In other embodiments, dsRNAs include one of the following at the 2′ position: C₁ to C₁₀ lower alkyl, substituted lower alkyl, alkaryl, aralkyl, O-alkaryl or O-aralkyl, SH, SCH₃, OCN, Cl, Br, CN, CF₃, OCF₃, SOCH₃, SO₂CH₃, ONO₂, NO₂, N₃, NH₂, heterocycloalkyl, heterocycloalkaryl, aminoalkylamino, polyalkylamino, substituted silyl, an RNA cleaving group, a reporter group, an intercalator, a group for improving the pharmacokinetic properties of an iRNA, or a group for improving the pharmacodynamic properties of an iRNA, and other substituents having similar properties. In some embodiments, the modification includes a 2′-methoxyethoxy (2′-O—CH₂CH₂OCH₃, also known as 2′-O-(2-methoxyethyl) or 2′-MOE) (Martin et al., Helv. Chim. Acta, 1995, 78:486-504) i.e., an alkoxy-alkoxy group. Another exemplary modification is 2′-dimethylaminooxyethoxy, i.e., a O(CH₂)₂ON(CH₃)₂ group, also known as 2′-DMAOE, and 2′-dimethylaminoethoxyethoxy (also known in the art as 2′-O-dimethylaminoethoxyethyl or 2′-DMAEOE), i.e., 2′-O—CH₂—O—CH₂—N(CH₂)₂.

[0219] In other embodiments, an iRNA agent comprises one or more (e.g., about 1, 2, 3, 4, 5, 6, 7, 8, 9, 10, or more) acyclic nucleotides (or nucleosides). In certain embodiments, the sense strand or the antisense strand, or both sense strand and antisense strand, include less than five acyclic nucleotides per strand (e.g., four, three, two or one acyclic nucleotides per strand). The one or more acyclic nucleotides can be found, for example, in the double-stranded region, of the sense or antisense strand, or both strands; at the 5′-end, the 3′-end, both of the 5′ and 3′-ends of the sense or antisense strand, or both strands, of the iRNA agent. In one embodiment, one or more acyclic nucleotides are present at positions 1 to 8 of the sense or antisense strand, or both. In one embodiment, one or more acyclic nucleotides are found in the antisense strand at positions 4 to 10 (e.g., positions 6-8) from the 5′-end of the antisense strand. In another embodiment, the one or more acyclic nucleotides are found at one or both 3′-terminal overhangs of the iRNA agent.

[0220] The term “acyclic nucleotide” or “acyclic nucleoside” as used herein refers to any nucleotide or nucleoside having an acyclic sugar, e.g., an acyclic ribose. An exemplary acyclic nucleotide or nucleoside can include a nucleobase, e.g., a naturally-occurring or a modified nucleobase (e.g., a nucleobase as described herein). In certain embodiments, a bond between any of the ribose carbons (C1, C2, C3, C4, or C5), is independently or in combination absent from the nucleotide. In one embodiment, the bond between C2-C3 carbons of the ribose ring is absent, e.g., an acyclic 2′-3′-seco-nucleotide monomer. In other embodiments, the bond between C1-C2, C3-C4, or C4-C5 is absent (e.g., a 1′-2′, 3′-4′ or 4′-5′-seco nucleotide monomer). Exemplary acyclic nucleotides are disclosed in U.S. Pat. No. 8,314,227, incorporated herein by reference in its entirely. For example, an acyclic nucleotide can include any of monomers D-J in FIGS. 1-2 of U.S. Pat. No. 8,314,227. In one embodiment, the acyclic nucleotide includes the following monomer:

[chemical structure]

[0221] wherein Base is a nucleobase, e.g., a naturally-occurring or a modified nucleobase (e.g., a nucleobase as described herein).

[0222] In certain embodiments, the acyclic nucleotide can be modified or derivatized, e.g., by coupling the acyclic nucleotide to another moiety, e.g., a ligand (e.g., a GalNAc, a cholesterol ligand), an alkyl, a polyamine, a sugar, a polypeptide, among others.

[0223] In other embodiments, the iRNA agent includes one or more acyclic nucleotides and one or more LNAs (e.g., an LNA as described herein). For example, one or more acyclic nucleotides and/or one or more LNAs can be present in the sense strand, the antisense strand, or both. The number of acyclic nucleotides in one strand can be the same or different from the number of LNAs in the opposing strand. In certain embodiments, the sense strand and/or the antisense strand comprises less than five LNAs (e.g., four, three, two or one LNAs) located in the double-stranded region or a 3′-overhang. In other embodiments, one or two LNAs are located in the double stranded region or the 3′-overhang of the sense strand. Alternatively, or in combination, the sense strand and/or antisense strand comprises less than five acyclic nucleotides (e.g., four, three, two or one acyclic nucleotides) in the double-stranded region or a 3′-overhang. In one embodiment, the sense strand of the iRNA agent comprises one or two LNAs in the 3′-overhang of the sense strand, and one or two acyclic nucleotides in the double-stranded region of the antisense strand (e.g., at positions 4 to 10 (e.g., positions 6-8) from the 5′-end of the antisense strand) of the iRNA agent.

[0224] In other embodiments, inclusion of one or more acyclic nucleotides (alone or in addition to one or more LNAs) in the iRNA agent results in one or more (or all) of: (i) a reduction in an off-target effect; (ii) a reduction in passenger strand participation in RNAi; (iii) an increase in specificity of the guide strand for its target mRNA; (iv) a reduction in a microRNA off-target effect; (v) an increase in stability; or (vi) an increase in resistance to degradation, of the iRNA molecule.

[0225] Other modifications include 2′-methoxy (2′-OCH₃), 2′-aminopropoxy (2′-OCH₂CH₂CH₂NH₂) and 2′-fluoro (2′-F). Similar modifications may also be made at other positions on the RNA of an iRNA, particularly the 3′ position of the sugar on the 3′ terminal nucleotide or in 2′-5′ linked dsRNAs and the 5′ position of 5′ terminal nucleotide. iRNAs may also have sugar mimetics such as cyclobutyl moieties in place of the pentofuranosyl sugar. Representative U.S. patents that teach the preparation of such modified sugar structures include, but are not limited to, U.S. Pat. Nos. 4,981,957; 5,118,800; 5,319,080; 5,359,044; 5,393,878; 5,446,137; 5,466,786; 5,514,785; 5,519,134; 5,567,811; 5,576,427; 5,591,722; 5,597,909; 5,610,300; 5,627,053; 5,639,873; 5,646,265; 5,658,873; 5,670,633; and 5,700,920, certain of which are commonly owned with the instant application, and each of which is herein incorporated by reference.

[0226] An iRNA may also include nucleobase (often referred to in the art simply as “base”) modifications or substitutions. As used herein, “unmodified” or “natural” nucleobases include the purine bases adenine (A) and guanine (G), and the pyrimidine bases thymine (T), cytosine (C) and uracil (U). Modified nucleobases include other synthetic and natural nucleobases such as 5-methylcytosine (5-me-C), 5-hydroxymethyl cytosine, xanthine, hypoxanthine, 2-aminoadenine, 6-methyl and other alkyl derivatives of adenine and guanine, 2-propyl and other alkyl derivatives of adenine and guanine, 2-thiouracil, 2-thiothymine and 2-thiocytosine, 5-halouracil and cytosine, 5-propynyl uracil and cytosine, 6-azo uracil, cytosine and thymine, 5-uracil (pseudouracil), 4-thiouracil, 8-halo, 8-amino, 8-thiol, 8-thioalkyl, 8-hydroxyl anal other 8-substituted adenines and guanines, 5-halo, particularly 5-bromo, 5-trifluoromethyl and other 5-substituted uracils and cytosines, 7-methylguanine and 7-methyladenine, 8-azaguanine and 8-azaadenine, 7-deazaguanine and 7-daazaadenine and 3-deazaguanine and 3-deazaadenine. Further nucleobases include those disclosed in U.S. Pat. No. 3,687,808, those disclosed in Modified Nucleosides in Biochemistry, Biotechnology and Medicine, Herdewijn, P. ed. Wiley-VCH, 2008; those disclosed in The Concise Encyclopedia Of Polymer Science And Engineering, pages 858-859, Kroschwitz, J. L, ed. John Wiley & Sons, 1990, these disclosed by Englisch et al., Angewandte Chemie, International Edition, 1991, 30, 613, and those disclosed by Sanghvi, Y S., Chapter 15, dsRNA Research and Applications, pages 289-302, Crooke, S. T. and Lebleu, B., Ed., CRC Press, 1993. Certain of these nucleobases are particularly useful for increasing the binding affinity of the oligomeric compounds featured in the invention. These include 5-substituted pyrimidines, 6-azapyrimidines and N-2, N-6 and 0-6 substituted purines, including 2-aminopropyladenine, 5-propynyluracil and 5-propynylcytosine. 5-methylcytosine substitutions have been shown to increase nucleic acid duplex stability by 0.6-1.2° C. (Sanghvi, Y. S., Crooke, S. T. and Lebleu, B., Eds., dsRNA Research and Applications, CRC Press, Boca Raton, 1993, pp. 276-278) and are exemplary base substitutions, even more particularly when combined with 2′-O-methoxyethyl sugar modifications.

[0227] Representative U.S. patents that teach the preparation of certain of the above noted modified nucleobases as well as other modified nucleobases include, but are not limited to, the above noted U.S. Pat. No. 3,687,808, as well as U.S. Pat. Nos. 4,845,205; 5,130,30; 5,134,066; 5,175,273; 5,367,066; 5,432,272; 5,457,187; 5,459,255; 5,484,908; 5,502,177; 5,525,711; 5,552,540; 5,587,469; 5,594,121, 5,596,091; 5,614,617; 5,681,941; 6,015,886; 6,147,200; 6,166,197; 6,222,025; 6,235,887; 6,380,368; 6,528,640; 6,639,062; 6,617,438; 7,045,610; 7,427,672; and 7,495,088, each of which is herein incorporated by reference, and U.S. Pat. No. 5,750,692, also herein incorporated by reference.

[0228] The RNA of an iRNA can also be modified to include one or more (e.g., about 1, 2, 3, 4, 5, 6, 7, 8, 9, 10, or more) locked nucleic acids (LNA) (also referred to herein as “locked nucleotides”). In one embodiment, a locked nucleic acid is a nucleotide having a modified ribose moiety in which the ribose moiety comprises an extra bridge connecting, e.g., the 2′ and 4′ carbons. This structure effectively “locks” the ribose in the 3′-endo structural conformation. The addition of locked nucleic acids to siRNAs has been shown to increase siRNA stability in serum, increase thermal stability, and to reduce off-target effects (Elmen, J. et al., (2005) Nucleic Acids Research 33(1):439-447; Mook, O R. et al., (2007) Mol Canc Ther 6(3):833-843; Grunweller, A. et al., (2003) Nucleic Acids Research 31(12):3185-3193).

[0229] Representative U.S. patents that teach the preparation of locked nucleic acids include, but are not limited to, the following: U.S. Pat. Nos. 6,268,490; 6,670,461; 6,794,499; 6,998,484; 7,053,207; 7,084,125; 7,399,845, and 8,314,227, each of which is herein incorporated by reference in its entirety. Exemplary LNAs include but are not limited to, a 2′, 4′-C methylene bicyclo nucleotide (see for example Wengel et al., International PCT Publication No. WO 00/66604 and WO 99/14226).

[0230] In other embodiments, the iRNA agents include one or more (e.g., about 1, 2, 3, 4, 5, 6, 7, 8, 9, 10, or more) G-clamp nucleotides. A G-clamp nucleotide is a modified cytosine analog wherein the modifications confer the ability to hydrogen bond both Watson-Crick and Hoogsteen faces of a complementary guanine within a duplex, see for example Lin and Matteucci, 1998, J.

[0231] Am. Chem. Soc., 120, 8531-8532. A single G-clamp analog substitution within an oligonucleotide can result in substantially enhanced helical thermal stability and mismatch discrimination when hybridized to complementary oligonucleotides. The inclusion of such nucleotides in the iRNA molecules can result in enhanced affinity and specificity to nucleic acid targets, complementary sequences, or template strands.

[0232] Potentially stabilizing modifications to the ends of RNA molecules can include N-(acetylaminocaproyl)-4-hydroxyprolinol (Hyp-C6-NHAc), N-(caproyl-4-hydroxyprolinol (Hyp-C6), N-(acetyl-4-hydroxyprolinol (Hyp-NHAc), thymidine-2′-O-deoxythymidine (ether), N-(aminocaproyl)-4-hydroxyprolinol (Hyp-C6-amino), 2-docosanoyl-uridine-3″-phosphate, inverted base dT(idT) and others. Disclosure of this modification can be found in PCT Publication No. WO 2011/005861.

iRNA Motifs

[0233] In one embodiment, the sense strand sequence may be represented by formula (I):

(I)
5′ nₚ-Nₐ-(X X X)ᵢ-N_{b}-Y Y Y-N_{b}-(Z Z Z)ⱼ-Nₐ-n_{q} 3′

[0234] wherein:
[0235] i and j are each independently 0 or 1;
[0236] p and q are each independently 0-6;
[0237] each Nₐ independently represents an oligonucleotide sequence comprising 0-25 modified nucleotides, each sequence comprising at least two differently modified nucleotides;
[0238] each N_{b} independently represents an oligonucleotide sequence comprising 0-10 modified nucleotides;
[0239] each nₚ and n_{q} independently represent an overhang nucleotide;
[0240] wherein N_{b} and Y do not have the same modification; and
[0241] XXX, YYY and ZZZ each independently represent one motif of three identical modifications on three consecutive nucleotides. Preferably YYY is all 2′-F modified nucleotides.

[0242] In one embodiment, the Nₐ and/or N_{b} comprise modifications of alternating pattern.

[0243] In one embodiment, the YYY motif occurs at or near the cleavage site of the sense strand. For example, when the RNAi agent has a duplex region of 17-23 nucleotides in length, the YYY motif can occur at or the vicinity of the cleavage site (e.g.: can occur at positions 6, 7, 8; 7, 8, 9; 8, 9, 10; 9, 10, 11; 10, 11, 12 or 11, 12, 13) of the sense strand, the count starting from the 1^{st} nucleotide, from the 5′-end; or optionally, the count starting at the 1^{st} paired nucleotide within the duplex region, from the 5′-end.

[0244] In one embodiment, i is 1 and j is 0, or i is 0 and j is 1, or both i and j are 1. The sense strand can therefore be represented by the following formulas:

(Ib)
5′ nₚ-Nₐ-YYY-N_{b}-ZZZ-Nₐ-n_{q} 3′;
(Ic)
5′ nₚ-Nₐ-XXX-N_{b}-YYY-Nₐ-n_{q} 3′;
or
(Id)
5′ nₚ-Nₐ-XXX-N_{b}-YYY-N_{b}-ZZZ-Nₐ-n_{q} 3′.

[0245] When the sense strand is represented by formula (Ib), N_{b} represents an oligonucleotide sequence comprising 0-10, 0-7, 0-5, 0-4, 0-2 or 0 modified nucleotides. Each Nₐ independently can represent an oligonucleotide sequence comprising 2-20, 2-15, or 2-10 modified nucleotides.

[0246] When the sense strand is represented as formula (Ic), N_{b} represents an oligonucleotide sequence comprising 0-10, 0-7, 0-5, 0-4, 0-2 or 0 modified nucleotides. Each Nₐ can independently represent an oligonucleotide sequence comprising 2-20, 2-15, or 2-10 modified nucleotides.

[0247] When the sense strand is represented as formula (Id), each N_{b} independently represents an oligonucleotide sequence comprising 0-10, 0-7, 0-5, 0-4, 0-2 or 0 modified nucleotides. Preferably, N_{b} is 0, 1, 2, 3, 4, 5 or 6. Each Nₐ can independently represent an oligonucleotide sequence comprising 2-20, 2-15, or 2-10 modified nucleotides.

[0248] Each of X, Y and Z may be the same or different from each other.

[0249] In other embodiments, i is 0 and j is 0, and the sense strand may be represented by the formula:

(Ia)
5′ nₚ-Nₐ-YYY-Nₐ-n_{q} 3′.

[0250] When the sense strand is represented by formula (Ia), each Nₐ independently can represent an oligonucleotide sequence comprising 2-20, 2-15, or 2-10 modified nucleotides.

[0251] In one embodiment, the antisense strand sequence of the RNAi may be represented by formula (II):

(II)
5′ n_{q′}-Nₐ′-(Z′Z′Z′)ₖ-N_{b}′-Y′Y′Y′-N_{b}′-(X′X′X′)ₗ-
N′ₐ-nₚ′ 3′

[0252] wherein:
[0253] k and l are each independently 0 or 1;
[0254] p′ and q′ are each independently 0-6;
[0255] each Nₐ′ independently represents an oligonucleotide sequence comprising 0-25 modified nucleotides, each sequence comprising at least two differently modified nucleotides;
[0256] each N_{b}′ independently represents an oligonucleotide sequence comprising 0-10 modified nucleotides;
[0257] each nₚ′ and n_{q}′ independently represent an overhang nucleotide;
[0258] wherein N_{b}′ and Y′ do not have the same modification; and
[0259] X′X′X′, Y′Y′Y′ and Z′Z′Z′ each independently represent one motif of three identical modifications on three consecutive nucleotides.

[0260] In one embodiment, the Nₐ′ and/or N_{b}′ comprise modifications of alternating pattern.

[0261] The Y′Y′Y′ motif occurs at or near the cleavage site of the antisense strand. For example, when the RNAi agent has a duplex region of 17-23 nucleotides in length, the Y′Y′Y′ motif can occur at positions 9, 10, 11; 10, 11, 12; 11, 12, 13; 12, 13, 14; or 13, 14, 15 of the antisense strand, with the count starting from the 1^{st} nucleotide, from the 5′-end; or optionally, the count starting at the 1^{st} paired nucleotide within the duplex region, from the 5′-end. Preferably, the Y′Y′Y′ motif occurs at positions 11, 12, 13.

[0262] In one embodiment, Y′Y′Y′ motif is all 2′-OMe modified nucleotides.

[0263] In one embodiment, k is 1 and 1 is 0, or k is 0 and 1 is 1, or both k and l are 1.

[0264] The antisense strand can therefore be represented by the following formulas:

(IIb)
5′ n_{q′}-Nₐ′-Z′Z′Z′-N_{b}′-Y′Y′Y′-Nₐ′-n_{p′} 3′;
(IIc)
5′ n_{q′}-Nₐ′-Y′Y′Y′-N_{b}′-X′X′X′-n_{p′} 3′;
or
(IId)
5′ n_{q′}-Nₐ′-Z′Z′Z′-N_{b}′-Y′Y′Y′-N_{b}′-X′X′X′-Nₐ′-n_{p′}-3′.

[0265] When the antisense strand is represented by formula (IIb), N_{b}′ represents an oligonucleotide sequence comprising 0-10, 0-7, 0-5, 0-4, 0-2 or 0 modified nucleotides. Each Nₐ′ independently represents an oligonucleotide sequence comprising 2-20, 2-15, or 2-10 modified nucleotides.

[0266] When the antisense strand is represented as formula (IIc), N_{b}′ represents an oligonucleotide sequence comprising 0-10, 0-7, 0-5, 0-4, 0-2 or 0 modified nucleotides. Each Nₐ′ independently represents an oligonucleotide sequence comprising 2-20, 2-15, or 2-10 modified nucleotides.

[0267] When the antisense strand is represented as formula (IId), each N_{b}′ independently represents an oligonucleotide sequence comprising 0-10, 0-7, 0-5, 0-4, 0-2 or 0 modified nucleotides. Each Nₐ′ independently represents an oligonucleotide sequence comprising 2-20, 2-15, or 2-10 modified nucleotides. Preferably, N_{b} is 0, 1, 2, 3, 4, 5 or 6.

[0268] In other embodiments, k is 0 and 1 is 0 and the antisense strand may be represented by the formula:

(Ia)
5′ n_{p′}-N_{a′}-Y′Y′Y′-N_{a′}-n_{q′} 3′.

[0269] When the antisense strand is represented as formula (IIa), each Nₐ′ independently represents an oligonucleotide sequence comprising 2-20, 2-15, or 2-10 modified nucleotides.

[0270] Each of X′, Y′ and Z′ may be the same or different from each other.

[0271] Each nucleotide of the sense strand and antisense strand may be independently modified with LNA, HNA, CeNA, 2′-methoxyethyl, 2′-O-methyl, 2′-O-allyl, 2′-C-allyl, 2′-hydroxyl, or 2′-fluoro. For example, each nucleotide of the sense strand and antisense strand is independently modified with 2′-O-methyl or 2′-fluoro. Each X, Y, Z, X′, Y′ and Z′, in particular, may represent a 2′-O-methyl modification or a 2′-fluoro modification.

[0272] In one embodiment, the sense strand of the RNAi agent may contain YYY motif occurring at 9, 10 and 11 positions of the strand when the duplex region is 21 nt, the count starting from the 1^{st} nucleotide from the 5′-end, or optionally, the count starting at the 1^{st} paired nucleotide within the duplex region, from the 5′-end; and Y represents 2′-F modification. The sense strand may additionally contain XXX motif or ZZZ motifs as wing modifications at the opposite end of the duplex region; and XXX and ZZZ each independently represents a 2′-OMe modification or 2′-F modification.

[0273] In one embodiment the antisense strand may contain Y′Y′Y′ motif occurring at positions 11, 12, 13 of the strand, the count starting from the 1^{st} nucleotide from the 5′-end, or optionally, the count starting at the 1^{st} paired nucleotide within the duplex region, from the 5′-end; and Y′ represents 2′-O-methyl modification. The antisense strand may additionally contain X′X′X′ motif or Z′Z′Z′ motifs as wing modifications at the opposite end of the duplex region; and X′X′X′ and Z′Z′Z′ each independently represents a 2′-OMe modification or 2′-F modification.

[0274] The sense strand represented by any one of the above formulas (Ia), (Ib), (Ic), and (Id) forms a duplex with a antisense strand being represented by any one of formulas (IIa), (IIb), (IIc), and (IId), respectively.

[0275] Accordingly, the RNAi agents for use in the methods of the invention may comprise a sense strand and an antisense strand, each strand having 14 to 30 nucleotides, the RNAi duplex represented by formula (III):

(III)
sense:
5′ nₚ-Nₐ-(X X X)ᵢ-N_{b}-Y Y Y-N_{b}-(Z Z Z)ⱼ-Nₐ-n_{q} 3′
antisense:
3′ nₚ′-Nₐ′-(X′X′X′)ₖ-N_{b}′-Y′Y′Y′-N_{b}′-(Z′Z′Z′)ₗ-
Nₐ′-n_{q}′5′

[0276] wherein:
[0277] i, j, k, and 1 are each independently 0 or 1;
[0278] p, p′, q, and q′ are each independently 0-6;
[0279] each Nₐ and Nₐ′ independently represents an oligonucleotide sequence comprising 0-25 modified nucleotides, each sequence comprising at least two differently modified nucleotides;
[0280] each N_{b} and N_{b}′ independently represents an oligonucleotide sequence comprising 0-10 modified nucleotides;
[0281] wherein
[0282] each nₚ′, nₚ, n_{q}′, and n_{q}, each of which may or may not be present, independently represents an overhang nucleotide; and
[0283] XXX, YYY, ZZZ, X′X′X′, Y′Y′Y′, and Z′Z′Z′ each independently represent one motif of three identical modifications on three consecutive nucleotides.

[0284] In one embodiment, i is 0 and j is 0; or i is 1 and j is 0; or i is 0 and j is 1; or both i and j are 0; or both i and j are 1. In another embodiment, k is 0 and 1 is 0; or k is 1 and 1 is 0; k is 0 and 1 is 1; or both k and l are 0; or both k and l are 1.

[0285] Exemplary combinations of the sense strand and antisense strand forming a RNAi duplex include the formulas below:

(IIIa)
5′ nₚ-Nₐ-Y Y Y-Nₐ-n_{q} 3′
3′ nₚ′-Nₐ′-Y′Y′Y′-Nₐ′n_{q}′ 5′
(IIIb)
5′ nₚ-Nₐ-Y Y Y-N_{b}-Z Z Z-Nₐ-n_{q} 3′
3′ nₚ′-Nₐ′-Y′Y′Y′-N_{b}′-Z′Z′Z′-Nₐ′n_{q}′ 5′
(IIIc)
5′ nₚ-Nₐ-X X X-N_{b}-Y Y Y-Nₐ-n_{q} 3′
3′ nₚ′-Nₐ′-X′X′X′-N_{b}′-Y′Y′Y′-Nₐ′-n_{q}′ 5′
(IIId)
5′ nₚ-Nₐ-X X X -N_{b}-Y Y Y-N_{b}-Z Z Z-Nₐ-n_{q} 3′
3′ nₚ′-Nₐ′-X′X′X′-N_{b}′-Y′Y′Y′-N_{b}′-Z′Z′Z′-Nₐ-n_{q}′ 5′

[0286] When the RNAi agent is represented by formula (IIIa), each Nₐ independently represents an oligonucleotide sequence comprising 2-20, 2-15, or 2-10 modified nucleotides.

[0287] When the RNAi agent is represented by formula (IIIb), each N_{b} independently represents an oligonucleotide sequence comprising 1-10, 1-7, 1-5 or 1-4 modified nucleotides. Each Na independently represents an oligonucleotide sequence comprising 2-20, 2-15, or 2-10 modified nucleotides.

[0288] When the RNAi agent is represented as formula (IIIc), each N_{b}, N_{b}′ independently represents an oligonucleotide sequence comprising 0-10, 0-7, 0-5, 0-4, 0-2 or 0modified nucleotides. Each Nₐ independently represents an oligonucleotide sequence comprising 2-20, 2-15, or 2-10 modified nucleotides.

[0289] When the RNAi agent is represented as formula (IIId), each N_{b}, N_{b}′ independently represents an oligonucleotide sequence comprising 0-10, 0-7, 0-5, 0-4, 0-2 or 0modified nucleotides. Each Nₐ, Nₐ′ independently represents an oligonucleotide sequence comprising 2-20, 2-15, or 2-10 modified nucleotides. Each of Nₐ, Nₐ′, N_{b} and N_{b}′ independently comprises modifications of alternating pattern.

[0290] Each of X, Y and Z in formulas (III), (IIIa), (IIIb), (IIIc), and (IIId) may be the same or different from each other.

[0291] When the RNAi agent is represented by formula (III), (IIIa), (IIIb), (IIIc), and (IIId), at least one of the Y nucleotides may form a base pair with one of the Y′ nucleotides. Alternatively, at least two of the Y nucleotides form base pairs with the corresponding Y′ nucleotides; or all three of the Y nucleotides all form base pairs with the corresponding Y′ nucleotides.

[0292] When the RNAi agent is represented by formula (IIIb) or (IIId), at least one of the Z nucleotides may form a base pair with one of the Z′ nucleotides. Alternatively, at least two of the Z nucleotides form base pairs with the corresponding Z′ nucleotides; or all three of the Z nucleotides all form base pairs with the corresponding Z′ nucleotides.

[0293] When the RNAi agent is represented as formula (IIIc) or (IIId), at least one of the X nucleotides may form a base pair with one of the X′ nucleotides. Alternatively, at least two of the X nucleotides form base pairs with the corresponding X′ nucleotides; or all three of the X nucleotides all form base pairs with the corresponding X′ nucleotides.

[0294] In one embodiment, the modification on the Y nucleotide is different than the modification on the Y′ nucleotide, the modification on the Z nucleotide is different than the modification on the Z′ nucleotide, and/or the modification on the X nucleotide is different than the modification on the X′ nucleotide.

[0295] In one embodiment, when the RNAi agent is represented by formula (IIId), the Na modifications are 2′-O-methyl or 2′-fluoro modifications. In another embodiment, when the RNAi agent is represented by formula (IIId), the Nₐ modifications are 2′-O-methyl or 2′-fluoro modifications and nₚ′>0 and at least one nₚ′ is linked to a neighboring nucleotide a via phosphorothioate linkage. In yet another embodiment, when the RNAi agent is represented by formula (IIId), the Nₐ modifications are 2′-O-methyl or 2′-fluoro modifications, nₚ′>0 and at least one nₚ′ is linked to a neighboring nucleotide via phosphorothioate linkage, and the sense strand is conjugated to one or more GalNAc derivatives attached through a bivalent or trivalent branched linker. In another embodiment, when the RNAi agent is represented by formula (IIId), the Nₐ modifications are 2′-O-methyl or 2′-fluoro modifications, nₚ′>0 and at least one nₚ′ is linked to a neighboring nucleotide via phosphorothioate linkage, the sense strand comprises at least one phosphorothioate linkage, and the sense strand is conjugated to one or more GalNAc derivatives attached through a bivalent or trivalent branched linker.

[0296] In one embodiment, when the RNAi agent is represented by formula (IIIa), the Nₐ modifications are 2′-O-methyl or 2′-fluoro modifications, nₚ′>0 and at least one nₚ′ is linked to a neighboring nucleotide via phosphorothioate linkage, the sense strand comprises at least one phosphorothioate linkage, and the sense strand is conjugated to one or more GalNAc derivatives attached through a bivalent or trivalent branched linker.

[0297] In one embodiment, the RNAi agent is a multimer containing at least two duplexes represented by formula (III), (IIIa), (IIIb), (IIIc), and (IIId), wherein the duplexes are connected by a linker. The linker can be cleavable or non-cleavable. Optionally, the multimer further comprises a ligand. Each of the duplexes can target the same gene or two different genes; or each of the duplexes can target same gene at two different target sites.

[0298] In one embodiment, the RNAi agent is a multimer containing three, four, five, six or more duplexes represented by formula (III), (IIIa), (IIIb), (IIIc), and (IIId), wherein the duplexes are connected by a linker. The linker can be cleavable or non-cleavable. Optionally, the multimer further comprises a ligand. Each of the duplexes can target the same gene or two different genes; or each of the duplexes can target same gene at two different target sites.

[0299] In one embodiment, two RNAi agents represented by formula (III), (IIIa), (IIIb), (IIIc), and (IIId) are linked to each other at the 5′ end, and one or both of the 3′ ends and are optionally conjugated to a ligand. Each of the agents can target the same gene or two different genes; or each of the agents can target same gene at two different target sites.

iRNA Conjugates

[0300] The iRNA agents disclosed herein can be in the form of conjugates. The conjugate may be attached at any suitable location in the iRNA molecule, e.g., at the 3′ end or the 5′ end of the sense or the antisense strand. The conjugates are optionally attached via a linker.

[0301] In some embodiments, an iRNA agent described herein is chemically linked to one or more ligands, moieties or conjugates, which may confer functionality, e.g., by affecting (e.g., enhancing) the activity, cellular distribution or cellular uptake of the iRNA. Such moieties include but are not limited to lipid moieties such as a cholesterol moiety (Letsinger et al., Proc. Natl. Acid. Sci. USA, 1989, 86: 6553-6556), cholic acid (Manoharan et al., Biorg. Med. Chem. Let., 1994, 4:1053-1060), a thioether, e.g., beryl-S-tritylthiol (Manoharan et al., Ann. N.Y. Acad. Sci., 1992, 660:306-309; Manoharan et al., Biorg. Med. Chem. Let., 1993, 3:2765-2770), a thiocholesterol (Oberhauser et al., Nucl. Acids Res., 1992, 20:533-538), an aliphatic chain, e.g., dodecandiol or undecyl residues (Saison-Behmoaras et al., EMBO J, 1991, 10:1111-1118; Kabanov et al., FEBS Lett., 1990, 259:327-330; Svinarchuk et al., Biochimie, 1993, 75:49-54), a phospholipid, e.g., di-hexadecyl-rac-glycerol or triethyl-ammonium 1,2-di-O-hexadecyl-rac-glycero-3-phosphonate (Manoharan et al., Tetrahedron Lett., 1995, 36:3651-3654; Shea et al., Nucl. Acids Res., 1990, 18:3777-3783), a polyamine or a polyethylene glycol chain (Manoharan et al., Nucleosides & Nucleotides, 1995, 14:969-973), or adamantane acetic acid (Manoharan et al., Tetrahedron Lett., 1995, 36:3651-3654), a palmityl moiety (Mishra et al., Biochim. Biophys. Acta, 1995, 1264:229-237), or an octadecylamine or hexylamino-carbonyloxycholesterol moiety (Crooke et al., J. Pharmacol. Exp. Ther., 1996, 277:923-937).

[0302] In one embodiment, a ligand alters the distribution, targeting or lifetime of an iRNA agent into which it is incorporated. In some embodiments, a ligand provides an enhanced affinity for a selected target, e.g, molecule, cell or cell type, compartment, e.g., a cellular or organ compartment, tissue, organ or region of the body, as, e.g., compared to a species absent such a ligand. Typical ligands will not take part in duplex pairing in a duplexed nucleic acid.

[0303] Ligands can include a naturally occurring substance, such as a protein (e.g., human serum albumin (HSA), low-density lipoprotein (LDL), or globulin); carbohydrate (e.g., a dextran, pullulan, chitin, chitosan, inulin, cyclodextrin or hyaluronic acid); or a lipid. The ligand may also be a recombinant or synthetic molecule, such as a synthetic polymer, e.g., a synthetic polyamino acid. Examples of polyamino acids include polyamino acid is a polylysine (PLL), poly L-aspartic acid, poly L-glutamic acid, styrene-maleic acid anhydride copolymer, poly(L-lactide-co-glycolied) copolymer, divinyl ether-maleic anhydride copolymer, N-(2-hydroxypropyl)methacrylamide copolymer (HMPA), polyethylene glycol (PEG), polyvinyl alcohol (PVA), polyurethane, poly(2-ethylacryllic acid), N-isopropylacrylamide polymers, or polyphosphazine. Example of polyamines include: polyethylenimine, polylysine (PLL), spermine, spermidine, polyamine, pseudopeptide-polyamine, peptidomimetic polyamine, dendrimer polyamine, arginine, amidine, protamine, cationic lipid, cationic porphyrin, quaternary salt of a polyamine, or an a helical peptide.

[0304] Ligands can also include targeting groups, e.g., a cell or tissue targeting agent, e.g., a lectin, glycoprotein, lipid or protein, e.g., an antibody, that binds to a specified cell type such as a kidney cell. A targeting group can be a thyrotropin, melanotropin, lectin, glycoprotein, surfactant protein A, Mucin carbohydrate, multivalent lactose, multivalent galactose, N-acetyl-galactosamine, N-acetyl-gulucosamine multivalent mannose, multivalent fucose, glycosylated polyaminoacids, multivalent galactose, transferrin, bisphosphonate, polyglutamate, polyaspartate, a lipid, cholesterol, a steroid, bile acid, folate, vitamin B12, biotin, or an RGD peptide or RGD peptide mimetic.

[0305] In some embodiments, the ligand is a GalNAc ligand that comprises one or more N-acetylgalactosamine (GalNAc) derivatives. In some embodiments, the GalNAc ligand is used to target the iRNA to the liver (e.g., to hepatocytes). Additional description of GalNAc ligands is provided in the section titled Carbohydrate Conjugates.

[0306] Other examples of ligands include dyes, intercalating agents (e.g. acridines), cross-linkers (e.g. psoralene, mitomycin C), porphyrins (TPPC4, texaphyrin, Sapphyrin), polycyclic aromatic hydrocarbons (e.g., phenazine, dihydrophenazine), artificial endonucleases (e.g. EDTA), lipophilic molecules, e.g, cholesterol, cholic acid, adamantane acetic acid, 1-pyrene butyric acid, dihydrotestosterone, 1,3-Bis-O(hexadecyl)glycerol, geranyloxyhexyl group, hexadecylglycerol, borneol, menthol, 1,3-propanediol, heptadecyl group, palmitic acid, myristic acid,O3-(oleoyl)lithocholic acid, O3-(oleoyl)cholenic acid, dimethoxytrityl, or phenoxazine) and peptide conjugates (e.g., antennapedia peptide, Tat peptide), alkylating agents, phosphate, amino, mercapto, PEG (e.g., PEG-40K), MPEG, [MPEG]₂, polyamino, alkyl, substituted alkyl, radiolabeled markers, enzymes, haptens (e.g. biotin), transport/absorption facilitators (e.g., aspirin, vitamin E, folic acid), synthetic ribonucleases (e.g., imidazole, bisimidazole, histamine, imidazole clusters, acridine-imidazole conjugates, Eu3+ complexes of tetraazamacrocycles), dinitrophenyl, HRP, or AP.

[0307] Ligands can be proteins, e.g., glycoproteins, or peptides, e.g., molecules having a specific affinity for a co-ligand, or antibodies e.g., an antibody, that binds to a specified cell type such as a cancer cell, endothelial cell, or bone cell. Ligands may also include hormones and hormone receptors. They can also include non-peptidic species, such as lipids, lectins, carbohydrates, vitamins, cofactors, multivalent lactose, multivalent galactose, N-acetyl-galactosamine, N-acetyl-gulucosamine multivalent mannose, or multivalent fucose. The ligand can be, for example, a lipopolysaccharide, an activator of p38 MAP kinase, or an activator of NF-κB.

[0308] The ligand can be a substance, e.g, a drug, which can increase the uptake of the iRNA agent into the cell, for example, by disrupting the cell's cytoskeleton, e.g., by disrupting the cell's microtubules, microfilaments, and/or intermediate filaments. The drug can be, for example, taxon, vincristine, vinblastine, cytochalasin, nocodazole, japlakinolide, latrunculin A, phalloidin, swinholide A, indanocine, or myoservin.

[0309] In some embodiments, a ligand attached to an iRNA as described herein acts as a pharmacokinetic modulator (PK modulator). PK modulators include lipophiles, bile acids, steroids, phospholipid analogues, peptides, protein binding agents, PEG, vitamins etc. Exemplary PK modulators include, but are not limited to, cholesterol, fatty acids, cholic acid, lithocholic acid, dialkylglycerides, diacylglyceride, phospholipids, sphingolipids, naproxen, ibuprofen, vitamin E, biotin etc. Oligonucleotides that comprise a number of phosphorothioate linkages are also known to bind to serum protein, thus short oligonucleotides, e.g., oligonucleotides of about 5 bases, 10 bases, 15 bases or 20 bases, comprising multiple of phosphorothioate linkages in the backbone are also amenable to the present invention as ligands (e.g. as PK modulating ligands). In addition, aptamers that bind serum components (e.g. serum proteins) are also suitable for use as PK modulating ligands in the embodiments described herein.

[0310] Ligand-conjugated oligonucleotides of the invention may be synthesized by the use of an oligonucleotide that bears a pendant reactive functionality, such as that derived from the attachment of a linking molecule onto the oligonucleotide (described below). This reactive oligonucleotide may be reacted directly with commercially-available ligands, ligands that are synthesized bearing any of a variety of protecting groups, or ligands that have a linking moiety attached thereto.

[0311] The oligonucleotides used in the conjugates of the present invention may be conveniently and routinely made through the well-known technique of solid-phase synthesis. Equipment for such synthesis is sold by several vendors including, for example, Applied Biosystems (Foster City, Calif.). Any other means for such synthesis known in the art may additionally or alternatively be employed. It is also known to use similar techniques to prepare other oligonucleotides, such as the phosphorothioates and alkylated derivatives.

[0312] In the ligand-conjugated oligonucleotides and ligand-molecule bearing sequence-specific linked nucleosides of the present invention, the oligonucleotides and oligonucleosides may be assembled on a suitable DNA synthesizer utilizing standard nucleotide or nucleoside precursors, or nucleotide or nucleoside conjugate precursors that already bear the linking moiety, ligand-nucleotide or nucleoside-conjugate precursors that already bear the ligand molecule, or non-nucleoside ligand-bearing building blocks.

[0313] When using nucleotide-conjugate precursors that already bear a linking moiety, the synthesis of the sequence-specific linked nucleosides is typically completed, and the ligand molecule is then reacted with the linking moiety to form the ligand-conjugated oligonucleotide.

[0314] In some embodiments, the oligonucleotides or linked nucleosides of the present invention are synthesized by an automated synthesizer using phosphoramidites derived from ligand-nucleoside conjugates in addition to the standard phosphoramidites and non-standard phosphoramidites that are commercially available and routinely used in oligonucleotide synthesis.

### Lipid Conjugates

[0315] In one embodiment, the ligand is a lipid or lipid-based molecule. Such a lipid or lipid-based molecule can typically bind a serum protein, such as human serum albumin (HSA). An HSA binding ligand allows for distribution of the conjugate to a target tissue. For example, the target tissue can be the liver, including parenchymal cells of the liver. Other molecules that can bind HSA can also be used as ligands. For example, neproxin or aspirin can be used. A lipid or lipid-based ligand can (a) increase resistance to degradation of the conjugate, (b) increase targeting or transport into a target cell or cell membrane, and/or (c) can be used to adjust binding to a serum protein, e.g., HSA.

[0316] A lipid based ligand can be used to modulate, e.g., control (e.g., inhibit) the binding of the conjugate to a target tissue. For example, a lipid or lipid-based ligand that binds to HSA more strongly will be less likely to be targeted to the kidney and therefore less likely to be cleared from the body. A lipid or lipid-based ligand that binds to HSA less strongly can be used to target the conjugate to the kidney.

[0317] In one embodiment, the lipid based ligand binds HSA. For example, the ligand can bind HSA with a sufficient affinity such that distribution of the conjugate to a non-kidney tissue is enhanced. However, the affinity is typically not so strong that the HSA-ligand binding cannot be reversed.

[0318] In another embodiment, the lipid based ligand binds HSA weakly or not at all, such that distribution of the conjugate to the kidney is enhanced. Other moieties that target to kidney cells can also be used in place of or in addition to the lipid based ligand.

[0319] In another aspect, the ligand is a moiety, e.g., a vitamin, which is taken up by a target cell, e.g., a proliferating cell. These are particularly useful for treating disorders characterized by unwanted cell proliferation, e.g., of the malignant or non-malignant type, e.g., cancer cells. Exemplary vitamins include vitamin A, E, and K. Other exemplary vitamins include are B vitamin, e.g., folic acid, B12, riboflavin, biotin, pyridoxal or other vitamins or nutrients taken up by cancer cells. Also included are HSA and low density lipoprotein (LDL).

### Cell Permeation Agents

[0320] In another aspect, the ligand is a cell-permeation agent, such as a helical cell-permeation agent. In one embodiment, the agent is amphipathic. An exemplary agent is a peptide such as tat or antennopedia. If the agent is a peptide, it can be modified, including a peptidylmimetic, invertomers, non-peptide or pseudo-peptide linkages, and use of D-amino acids. The helical agent is typically an α-helical agent, and can have a lipophilic and a lipophobic phase.

[0321] The ligand can be a peptide or peptidomimetic. A peptidomimetic (also referred to herein as an oligopeptidomimetic) is a molecule capable of folding into a defined three-dimensional structure similar to a natural peptide. The attachment of peptide and peptidomimetics to iRNA agents can affect pharmacokinetic distribution of the iRNA, such as by enhancing cellular recognition and absorption. The peptide or peptidomimetic moiety can be about 5-50 amino acids long, e.g., about 5, 10, 15, 20, 25, 30, 35, 40, 45, or 50 amino acids long.

[0322] A peptide or peptidomimetic can be, for example, a cell permeation peptide, cationic peptide, amphipathic peptide, or hydrophobic peptide (e.g., consisting primarily of Tyr, Trp or Phe). The peptide moiety can be a dendrimer peptide, constrained peptide or crosslinked peptide. In another alternative, the peptide moiety can include a hydrophobic membrane translocation sequence (MTS). An exemplary hydrophobic MTS-containing peptide is RFGF having the amino acid sequence AAVALLPAVLLALLAP (SEQ ID NO: 323). An RFGF analogue (e.g., amino acid sequence AALLPVLLAAP (SEQ ID NO: 324)) containing a hydrophobic MTS can also be a targeting moiety. The peptide moiety can be a “delivery” peptide, which can carry large polar molecules including peptides, oligonucleotides, and protein across cell membranes. For example, sequences from the HIV Tat protein (GRKKRRQRRRPPQ (SEQ ID NO: 325)) and the Drosophila antennapedia protein (RQIKIWFQNRRMKWKK (SEQ ID NO: 326)) have been found to be capable of functioning as delivery peptides. A peptide or peptidomimetic can be encoded by a random sequence of DNA, such as a peptide identified from a phage-display library, or one-bead-one-compound (OBOC) combinatorial library (Lam et al., Nature, 354:82-84, 1991). Typically, the peptide or peptidomimetic tethered to a dsRNA agent via an incorporated monomer unit is a cell targeting peptide such as an arginine-glycine-aspartic acid (RGD)-peptide, or RGD mimic. A peptide moiety can range in length from about 5 amino acids to about 40 amino acids. The peptide moieties can have a structural modification, such as to increase stability or direct conformational properties. Any of the structural modifications described below can be utilized.

[0323] An RGD peptide for use in the compositions and methods of the invention may be linear or cyclic, and may be modified, e.g., glycosylated or methylated, to facilitate targeting to a specific tissue(s). RGD-containing peptides and peptidiomimemtics may include D-amino acids, as well as synthetic RGD mimics. In addition to RGD, one can use other moieties that target the integrin ligand. Preferred conjugates of this ligand target PECAM-1 or VEGF.

[0324] An RGD peptide moiety can be used to target a particular cell type, e.g., a tumor cell, such as an endothelial tumor cell or a breast cancer tumor cell (Zitzmann et al., Cancer Res., 62:5139-43, 2002). An RGD peptide can facilitate targeting of an dsRNA agent to tumors of a variety of other tissues, including the lung, kidney, spleen, or liver (Aoki et al., Cancer Gene Therapy 8:783-787, 2001). Typically, the RGD peptide will facilitate targeting of an iRNA agent to the kidney. The RGD peptide can be linear or cyclic, and can be modified, e.g., glycosylated or methylated to facilitate targeting to specific tissues. For example, a glycosylated RGD peptide can deliver a iRNA agent to a tumor cell expressing α_{V}β₃ (Haubner et al., Jour. Nucl. Med., 42:326-336, 2001).

[0325] A “cell permeation peptide” is capable of permeating a cell, e.g., a microbial cell, such as a bacterial or fungal cell, or a mammalian cell, such as a human cell. A microbial cell-permeating peptide can be, for example, an α-helical linear peptide (e.g., LL-37 or Ceropin P1), a disulfide bond-containing peptide (e.g., α-defensin, β-defensin or bactenecin), or a peptide containing only one or two dominating amino acids (e.g., PR-39 or indolicidin). A cell permeation peptide can also include a nuclear localization signal (NLS). For example, a cell permeation peptide can be a bipartite amphipathic peptide, such as MPG, which is derived from the fusion peptide domain of HIV-1 gp41 and the NLS of SV40 large T antigen (Simeoni et al., Nucl. Acids Res. 31:2717-2724, 2003).

### Carbohydrate Conjugates

[0326] In some embodiments of the compositions and methods of the invention, an iRNA oligonucleotide further comprises a carbohydrate. The carbohydrate conjugated iRNA are advantageous for the in vivo delivery of nucleic acids, as well as compositions suitable for in vivo therapeutic use, as described herein. As used herein, “carbohydrate” refers to a compound which is either a carbohydrate per se made up of one or more monosaccharide units having at least 6 carbon atoms (which can be linear, branched or cyclic) with an oxygen, nitrogen or sulfur atom bonded to each carbon atom; or a compound having as a part thereof a carbohydrate moiety made up of one or more monosaccharide units each having at least six carbon atoms (which can be linear, branched or cyclic), with an oxygen, nitrogen or sulfur atom bonded to each carbon atom. Representative carbohydrates include the sugars (mono-, di-, tri- and oligosaccharides containing from about 4, 5, 6, 7, 8, or 9 monosaccharide units), and polysaccharides such as starches, glycogen, cellulose and polysaccharide gums. Specific monosaccharides include C5 and above (e.g., C5, C6, C7, or C8) sugars; di- and trisaccharides include sugars having two or three monosaccharide units (e.g., C5, C6, C7, or C8).

[0327] In one embodiment, a carbohydrate conjugate comprises a monosaccharide. In one embodiment, the monosaccharide is an N-acetylgalactosamine (GalNAc). GalNAc conjugates, which comprise one or more N-acetylgalactosamine (GalNAc) derivatives, are described, for example, in U.S. Pat. No. 8,106,022, the entire content of which is hereby incorporated herein by reference. In some embodiments, the GalNAc conjugate serves as a ligand that targets the iRNA to particular cells. In some embodiments, the GalNAc conjugate targets the iRNA to liver cells, e.g., by serving as a ligand for the asialoglycoprotein receptor of liver cells (e.g., hepatocytes).

[0328] In some embodiments, the carbohydrate conjugate comprises one or more GalNAc derivatives. The GalNAc derivatives may be attached via a linker, e.g., a bivalent or trivalent branched linker. In some embodiments the GalNAc conjugate is conjugated to the 3′ end of the sense strand. In some embodiments, the GalNAc conjugate is conjugated to the iRNA agent (e.g., to the 3′ end of the sense strand) via a linker, e.g., a linker as described herein.

[0329] In some embodiments, the GalNAc conjugate is

[chemical structure]

[0330] In some embodiments, the RNAi agent is attached to the carbohydrate conjugate via a linker as shown in the following schematic, wherein X is O or S

[chemical structure]

[0331] In some embodiments, the RNAi agent is conjugated to L96 as defined in Table 1 and shown below

[chemical structure]

[0332] In some embodiments, a carbohydrate conjugate for use in the compositions and methods of the invention is selected from the group consisting of:

[chemical structure]

[chemical structure]

[chemical structure]

[chemical structure]

[0333] Another representative carbohydrate conjugate for use in the embodiments described herein includes, but is not limited to,

[chemical structure]

(Formula XXIII), when one of X or Y is an oligonucleotide, the other is a hydrogen.

[0334] In some embodiments, the carbohydrate conjugate further comprises one or more additional ligands as described above, such as, but not limited to, a PK modulator and/or a cell permeation peptide.

[0335] In one embodiment, an iRNA of the invention is conjugated to a carbohydrate through a linker. Non-limiting examples of iRNA carbohydrate conjugates with linkers of the compositions and methods of the invention include, but are not limited to,

[chemical structure]

[chemical structure]

[chemical structure]

(Formula XXX), when one of X or Y is an oligonucleotide, the other is a hydrogen.

### Linkers

[0336] In some embodiments, the conjugate or ligand described herein can be attached to an iRNA oligonucleotide with various linkers that can be cleavable or non-cleavable.

[0337] The term “linker” or “linking group” means an organic moiety that connects two parts of a compound, e.g., covalently attaches two parts of a compound. Linkers typically comprise a direct bond or an atom such as oxygen or sulfur, a unit such as NR8, C(O), C(O)NH, SO, SO₂, SO₂NH or a chain of atoms, such as, but not limited to, substituted or unsubstituted alkyl, substituted or unsubstituted alkenyl, substituted or unsubstituted alkynyl, arylalkyl, arylalkenyl, arylalkynyl, heteroarylalkyl, heteroarylalkenyl, heteroarylalkynyl, heterocyclylalkyl, heterocyclylalkenyl, heterocyclylalkynyl, aryl, heteroaryl, heterocyclyl, cycloalkyl, cycloalkenyl, alkylarylalkyl, alkylarylalkenyl, alkylarylalkynyl, alkenylarylalkyl, alkenylarylalkenyl, alkenylarylalkynyl, alkynylarylalkyl, alkynylarylalkenyl, alkynylarylalkynyl, alkylheteroarylalkyl, alkylheteroarylalkenyl, alkylheteroarylalkynyl, alkenylheteroarylalkyl, alkenylheteroarylalkenyl, alkenylheteroarylalkynyl, alkynylheteroarylalkyl, alkynylheteroarylalkenyl, alkynylheteroarylalkynyl, alkylheterocyclylalkyl, alkylheterocyclylalkenyl, alkylhererocyclylalkynyl, alkenylheterocyclylalkyl, alkenylheterocyclylalkenyl, alkenylheterocyclylalkynyl, alkynylheterocyclylalkyl, alkynylheterocyclylalkenyl, alkynylheterocyclylalkynyl, alkylaryl, alkenylaryl, alkynylaryl, alkylheteroaryl, alkenylheteroaryl, alkynylhereroaryl, which one or more methylenes can be interrupted or terminated by O, S, S(O), SO₂, N(R8), C(O), substituted or unsubstituted aryl, substituted or unsubstituted heteroaryl, substituted or unsubstituted heterocyclic; where R8 is hydrogen, acyl, aliphatic or substituted aliphatic. In one embodiment, the linker is between about 1-24 atoms, 2-24, 3-24, 4-24, 5-24, 6-24, 6-18, 7-18, 8-18 atoms, 7-17, 8-17, 6-16, 7-16, or 8-16 atoms.

[0338] In one embodiment, a dsRNA of the invention is conjugated to a bivalent or trivalent branched linker selected from the group of structures shown in any of formula (XXXI)-(XXXIV):

[chemical structure]

[0339] wherein:
[0340] q2A, q2B, q3A, q3B, q4A, q4B, q5A, q5B and q5C represent independently for each occurrence 0-20 and wherein the repeating unit can be the same or different;
[0341] P^{2A}, P^{2B}, P^{3A}, P^{3B}, P^{4A}, P^{4B}, P^{5A}, P^{5B}, P^{5C}, T^{2A}, T^{2B}, T^{3A}, T^{3B}, T^{4A}, T^{4B}, T^{4A}, T^{5B}, T^{5C} are each independently for each occurrence absent, CO, NH, O, S, OC(O), NHC(O), CH₂, CH₂NH or CH₂O;
[0342] Q^{2A}, Q^{2B}, Q^{3A}, Q^{3B}, Q^{4A}, Q^{4B}, Q^{5A}, Q^{5B}, Q^{5C} are independently for each occurrence absent, alkylene, substituted alkylene wherein one or more methylenes can be interrupted or terminated by one or more of O, S, S(O), SO₂, N(R^{N}), C(R′)═C(R″), C≡C or C(O); R^{2A}, R^{2B}, R^{3A}, R^{3B}, R^{4A}, R^{4B}, R^{5A}, R^{5B}, R^{5C} are each independently for each occurrence absent, NH, O, S, CH₂, C(O)O, C(O)NH, NHCH(R^{a})C(O), —C(O)—CH(R^{a})—NH—, CO, CH═N—O,

[chemical structure]

heterocyclyl;
[0343] L^{2A}, L^{2B}, L^{3A} L^{3B} L^{4A} L^{4B} L^{5A} L^{5B} and L^{5C} represent the ligand; i.e. each independently for each occurrence a monosaccharide (such as GalNAc), disaccharide, trisaccharide, tetrasaccharide, oligosaccharide, or polysaccharide; and R^{a} is H or amino acid side chain. Trivalent conjugating GalNAc derivatives are particularly useful for use with RNAi agents for inhibiting the expression of a target gene, such as those of formula (XXXV):

[chemical structure]

[0344] wherein L⁵A, L^{5B} and L^{5C} represent a monosaccharide, such as GalNAc derivative.

[0345] Examples of suitable bivalent and trivalent branched linker groups conjugating GalNAc derivatives include, but are not limited to, the structures recited above as formulas II, VII, XI, X, and XIII.

[0346] A cleavable linking group is one which is sufficiently stable outside the cell, but which upon entry into a target cell is cleaved to release the two parts the linker is holding together. In a preferred embodiment, the cleavable linking group is cleaved at least about 10 times, 20, times, 30 times, 40 times, 50 times, 60 times, 70 times, 80 times, 90 times or more, or at least about 100 times faster in a target cell or under a first reference condition (which can, e.g., be selected to mimic or represent intracellular conditions) than in the blood of a subject, or under a second reference condition (which can, e.g., be selected to mimic or represent conditions found in the blood or serum).

[0347] Cleavable linking groups are susceptible to cleavage agents, e.g., pH, redox potential or the presence of degradative molecules. Generally, cleavage agents are more prevalent or found at higher levels or activities inside cells than in serum or blood. Examples of such degradative agents include: redox agents which are selected for particular substrates or which have no substrate specificity, including, e.g., oxidative or reductive enzymes or reductive agents such as mercaptans, present in cells, that can degrade a redox cleavable linking group by reduction; esterases; endosomes or agents that can create an acidic environment, e.g., those that result in a pH of five or lower; enzymes that can hydrolyze or degrade an acid cleavable linking group by acting as a general acid, peptidases (which can be substrate specific), and phosphatases.

[0348] A cleavable linkage group, such as a disulfide bond can be susceptible to pH. The pH of human serum is 7.4, while the average intracellular pH is slightly lower, ranging from about 7.1-7.3. Endosomes have a more acidic pH, in the range of 5.5-6.0, and lysosomes have an even more acidic pH at around 5.0. Some linkers will have a cleavable linking group that is cleaved at a preferred pH, thereby releasing a cationic lipid from the ligand inside the cell, or into the desired compartment of the cell.

[0349] A linker can include a cleavable linking group that is cleavable by a particular enzyme. The type of cleavable linking group incorporated into a linker can depend on the cell to be targeted. For example, a liver-targeting ligand can be linked to a cationic lipid through a linker that includes an ester group. Liver cells are rich in esterases, and therefore the linker will be cleaved more efficiently in liver cells than in cell types that are not esterase-rich. Other cell-types rich in esterases include cells of the lung, renal cortex, and testis.

[0350] Linkers that contain peptide bonds can be used when targeting cell types rich in peptidases, such as liver cells and synoviocytes.

[0351] In general, the suitability of a candidate cleavable linking group can be evaluated by testing the ability of a degradative agent (or condition) to cleave the candidate linking group. It will also be desirable to also test the candidate cleavable linking group for the ability to resist cleavage in the blood or when in contact with other non-target tissue. Thus, one can determine the relative susceptibility to cleavage between a first and a second condition, where the first is selected to be indicative of cleavage in a target cell and the second is selected to be indicative of cleavage in other tissues or biological fluids, e.g., blood or serum. The evaluations can be carried out in cell free systems, in cells, in cell culture, in organ or tissue culture, or in whole animals. It can be useful to make initial evaluations in cell-free or culture conditions and to confirm by further evaluations in whole animals. In preferred embodiments, useful candidate compounds are cleaved at least about 2, 4, 10, 20, 30, 40, 50, 60, 70, 80, 90, or about 100 times faster in the cell (or under in vitro conditions selected to mimic intracellular conditions) as compared to blood or serum (or under in vitro conditions selected to mimic extracellular conditions).

### Redox Cleavable Linking Groups

[0352] In one embodiment, a cleavable linking group is a redox cleavable linking group that is cleaved upon reduction or oxidation. An example of reductively cleavable linking group is a disulphide linking group (—S—S—). To determine if a candidate cleavable linking group is a suitable “reductively cleavable linking group,” or for example is suitable for use with a particular iRNA moiety and particular targeting agent one can look to methods described herein. For example, a candidate can be evaluated by incubation with dithiothreitol (DTT), or other reducing agent using reagents know in the art, which mimic the rate of cleavage which would be observed in a cell, e.g., a target cell. The candidates can also be evaluated under conditions which are selected to mimic blood or serum conditions. In one, candidate compounds are cleaved by at most about 10% in the blood. In other embodiments, useful candidate compounds are degraded at least about 2, 4, 10, 20, 30, 40, 50, 60, 70, 80, 90, or about 100 times faster in the cell (or under in vitro conditions selected to mimic intracellular conditions) as compared to blood (or under in vitro conditions selected to mimic extracellular conditions). The rate of cleavage of candidate compounds can be determined using standard enzyme kinetics assays under conditions chosen to mimic intracellular media and compared to conditions chosen to mimic extracellular media.

### Phosphate-Based Cleavable Linking Groups

[0353] In another embodiment, a cleavable linker comprises a phosphate-based cleavable linking group. A phosphate-based cleavable linking group is cleaved by agents that degrade or hydrolyze the phosphate group. An example of an agent that cleaves phosphate groups in cells are enzymes such as phosphatases in cells. Examples of phosphate-based linking groups are —O—P(O)(ORk)-O—, —O—P(S)(ORk)-O—, —O—P(S)(SRk)-O—, —S—P(O)(ORk)-O—, —O—P(O)(ORk)-S—, —S—P(O)(ORk)-S—, —O—P(S)(ORk)-S—, —S—P(S)(ORk)-O—, —O—P(O)(Rk)-O—, —O—P(S)(Rk)-O—, —S—P(O)(Rk)-O—, —S—P(S)(Rk)-O—, —S—P(O)(Rk)-S—, —O—P(S)(Rk)-S—. Preferred embodiments are —O—P(O)(OH)—O—, —O—P(S)(OH)—O—, —O—P(S)(SH)—O—, —S—P(O)(OH)—O—, —O—P(O)(OH)—S—, —S—P(O)(OH)—S—, —O—P(S)(OH)—S—, —S—P(S)(OH)—O—, —O—P(O)(H)—O—, —O—P(S)(H)—O—, —S—P(O)(H)—O, —S—P(S)(H)—O—, —S—P(O)(H)—S—, —O—P(S)(H)—S—. A preferred embodiment is —O—P(O)(OH)—O—. These candidates can be evaluated using methods analogous to those described above.

### Acid Cleavable Linking Groups

[0354] In another embodiment, a cleavable linker comprises an acid cleavable linking group. An acid cleavable linking group is a linking group that is cleaved under acidic conditions. In preferred embodiments acid cleavable linking groups are cleaved in an acidic environment with a pH of about 6.5 or lower (e.g., about 6.0, 5.75, 5.5, 5.25, 5.0, or lower), or by agents such as enzymes that can act as a general acid. In a cell, specific low pH organelles, such as endosomes and lysosomes can provide a cleaving environment for acid cleavable linking groups. Examples of acid cleavable linking groups include but are not limited to hydrazones, esters, and esters of amino acids. Acid cleavable groups can have the general formula —C═NN—, C(O)O, or —OC(O). A preferred embodiment is when the carbon attached to the oxygen of the ester (the alkoxy group) is an aryl group, substituted alkyl group, or tertiary alkyl group such as dimethyl pentyl or t-butyl. These candidates can be evaluated using methods analogous to those described above.

### Ester-Based Cleavable Linking Groups

[0355] In another embodiment, a cleavable linker comprises an ester-based cleavable linking group. An ester-based cleavable linking group is cleaved by enzymes such as esterases and amidases in cells. Examples of ester-based cleavable linking groups include but are not limited to esters of alkylene, alkenylene and alkynylene groups. Ester cleavable linking groups have the general formula —C(O)O—, or —OC(O)—. These candidates can be evaluated using methods analogous to those described above.

### Peptide-Based Cleavable Linking Groups

[0356] In yet another embodiment, a cleavable linker comprises a peptide-based cleavable linking group. A peptide-based cleavable linking group is cleaved by enzymes such as peptidases and proteases in cells. Peptide-based cleavable linking groups are peptide bonds formed between amino acids to yield oligopeptides (e.g., dipeptides, tripeptides etc.) and polypeptides. Peptide-based cleavable groups do not include the amide group (—C(O)NH—). The amide group can be formed between any alkylene, alkenylene or alkynelene. A peptide bond is a special type of amide bond formed between amino acids to yield peptides and proteins. The peptide based cleavage group is generally limited to the peptide bond (i.e., the amide bond) formed between amino acids yielding peptides and proteins and does not include the entire amide functional group. Peptide-based cleavable linking groups have the general formula —NHCHRAC(O)NHCHRBC(O)—, where RA and RB are the R groups of the two adjacent amino acids. These candidates can be evaluated using methods analogous to those described above. Representative U.S. patents that teach the preparation of RNA conjugates include, but are not limited to, U.S. Pat. Nos. 4,828,979; 4,948,882; 5,218,105; 5,525,465; 5,541,313; 5,545,730; 5,552,538; 5,578,717, 5,580,731; 5,591,584; 5,109,124; 5,118,802; 5,138,045; 5,414,077; 5,486,603; 5,512,439; 5,578,718; 5,608,046; 4,587,044; 4,605,735; 4,667,025; 4,762,779; 4,789,737; 4,824,941; 4,835,263; 4,876,335; 4,904,582; 4,958,013; 5,082,830; 5,112,963; 5,214,136; 5,082,830; 5,112,963; 5,214,136; 5,245,022; 5,254,469; 5,258,506; 5,262,536; 5,272,250; 5,292,873; 5,317,098; 5,371,241, 5,391,723; 5,416,203, 5,451,463; 5,510,475; 5,512,667; 5,514,785; 5,565,552; 5,567,810; 5,574,142; 5,585,481; 5,587,371; 5,595,726; 5,597,696; 5,599,923; 5,599,928 and 5,688,941; 6,294,664; 6,320,017; 6,576,752; 6,783,931; 6,900,297; 7,037,646; 8,106,022, the entire contents of each of which is herein incorporated by reference.

[0357] It is not necessary for all positions in a given compound to be uniformly modified, and in fact more than one of the aforementioned modifications may be incorporated in a single compound or even at a single nucleoside within an iRNA. The present invention also includes iRNA compounds that are chimeric compounds.

[0358] “Chimeric” iRNA compounds, or “chimeras,” in the context of the present invention, are iRNA compounds, e.g., dsRNAs, that contain two or more chemically distinct regions, each made up of at least one monomer unit, i.e., a nucleotide in the case of a dsRNA compound. These iRNAs typically contain at least one region wherein the RNA is modified so as to confer upon the iRNA increased resistance to nuclease degradation, increased cellular uptake, and/or increased binding affinity for the target nucleic acid. An additional region of the iRNA may serve as a substrate for enzymes capable of cleaving RNA:DNA or RNA:RNA hybrids. By way of example, RNase H is a cellular endonuclease which cleaves the RNA strand of an RNA:DNA duplex. Activation of RNase H, therefore, results in cleavage of the RNA target, thereby greatly enhancing the efficiency of iRNA inhibition of gene expression. Consequently, comparable results can often be obtained with shorter iRNAs when chimeric dsRNAs are used, compared to phosphorothioate deoxy dsRNAs hybridizing to the same target region. Cleavage of the RNA target can be routinely detected by gel electrophoresis and, if necessary, associated nucleic acid hybridization techniques known in the art.

[0359] In certain instances, the RNA of an iRNA can be modified by a non-ligand group. A number of non-ligand molecules have been conjugated to iRNAs in order to enhance the activity, cellular distribution or cellular uptake of the iRNA, and procedures for performing such conjugations are available in the scientific literature. Such non-ligand moieties have included lipid moieties, such as cholesterol (Kubo, T. et al., Biochem. Biophys. Res. Comm., 2007, 365(1):54-61; Letsinger et al., Proc. Natl. Acad. Sci. USA, 1989, 86:6553), cholic acid (Manoharan et al., Bioorg. Med. Chem. Lett., 1994, 4:1053), a thioether, e.g., hexyl-S-tritylthiol (Manoharan et al., Ann. N.Y. Acad. Sci., 1992, 660:306; Manoharan et al., Bioorg. Med. Chem. Let., 1993, 3:2765), a thiocholesterol (Oberhauser et al., Nucl. Acids Res., 1992, 20:533), an aliphatic chain, e.g., dodecandiol or undecyl residues (Saison-Behmoaras et al., EMBO J., 1991, 10:111; Kabanov et al., FEBS Lett., 1990, 259:327; Svinarchuk et al., Biochimie, 1993, 75:49), a phospholipid, e.g., di-hexadecyl-rac-glycerol or triethylammonium 1,2-di-O-hexadecyl-rac-glycero-3-H-phosphonate (Manoharan et al., Tetrahedron Lett., 1995, 36:3651; Shea et al., Nucl. Acids Res., 1990, 18:3777), a polyamine or a polyethylene glycol chain (Manoharan et al., Nucleosides & Nucleotides, 1995, 14:969), or adamantane acetic acid (Manoharan et al., Tetrahedron Lett., 1995, 36:3651), a palmityl moiety (Mishra et al., Biochim. Biophys. Acta, 1995, 1264:229), or an octadecylamine or hexylamino-carbonyl-oxycholesterol moiety (Crooke et al., J. Pharmacol. Exp. Ther., 1996, 277:923). Representative United States patents that teach the preparation of such RNA conjugates have been listed above. Typical conjugation protocols involve the synthesis of an RNAs bearing an aminolinker at one or more positions of the sequence. The amino group is then reacted with the molecule being conjugated using appropriate coupling or activating reagents. The conjugation reaction may be performed either with the RNA still bound to the solid support or following cleavage of the RNA, in solution phase. Purification of the RNA conjugate by HPLC typically affords the pure conjugate.

Delivery of iRNA

[0360] The delivery of an iRNA to a subject in need thereof can be achieved in a number of different ways. In vivo delivery can be performed directly by administering a composition comprising an iRNA, e.g. a dsRNA, to a subject. Alternatively, delivery can be performed indirectly by administering one or more vectors that encode and direct the expression of the iRNA. These alternatives are discussed further below.

### Direct Delivery

[0361] In general, any method of delivering a nucleic acid molecule can be adapted for use with an iRNA (see e.g., Akhtar S. and Julian R L. (1992) Trends Cell. Biol. 2(5):139-144 and WO94/02595, which are incorporated herein by reference in their entireties). However, there are three factors that are important to consider in order to successfully deliver an iRNA molecule in vivo: (a) biological stability of the delivered molecule, (2) preventing non-specific effects, and (3) accumulation of the delivered molecule in the target tissue. The non-specific effects of an iRNA can be minimized by local administration, for example by direct injection or implantation into a tissue (as a non-limiting example, a tumor) or topically administering the preparation. Local administration to a treatment site maximizes local concentration of the agent, limits the exposure of the agent to systemic tissues that may otherwise be harmed by the agent or that may degrade the agent, and permits a lower total dose of the iRNA molecule to be administered. Several studies have shown successful knockdown of gene products when an iRNA is administered locally. For example, intraocular delivery of a VEGF dsRNA by intravitreal injection in cynomolgus monkeys (Tolentino, M J., et al (2004) Retina 24:132-138) and subretinal injections in mice (Reich, S J., et al (2003) Mol. Vis. 9:210-216) were both shown to prevent neovascularization in an experimental model of age-related macular degeneration. In addition, direct intratumoral injection of a dsRNA in mice reduces tumor volume (Pille, J., et al (2005) Mol. Ther. 11:267-274) and can prolong survival of tumor-bearing mice (Kim, W J., et al (2006) Mol. Ther. 14:343-350; Li, S., et al (2007) Mol. Ther. 15:515-523). RNA interference has also shown success with local delivery to the CNS by direct injection (Dorn, G., et al. (2004) Nucleic Acids 32:e49; Tan, P H., et al (2005) Gene Ther. 12:59-66; Makimura, H., et al (2002) BMC Neurosci. 3:18; Shishkina, G T., et al (2004) Neuroscience 129:521-528; Thakker, E R., et al (2004) Proc. Natl. Acad. Sci. U.S.A. 101:17270-17275; Akaneya, Y., et al (2005) J. Neurophysiol. 93:594-602) and to the lungs by intranasal administration (Howard, K A., et al (2006) Mol. Ther. 14:476-484; Zhang, X., et al (2004) J. Biol. Chem. 279:10677-10684; Bitko, V., et al (2005) Nat. Med. 11:50-55). For administering an iRNA systemically for the treatment of a disease, the RNA can be modified or alternatively delivered using a drug delivery system; both methods act to prevent the rapid degradation of the dsRNA by endo- and exo-nucleases in vivo.

[0362] Modification of the RNA or the pharmaceutical carrier can also permit targeting of the iRNA composition to the target tissue and avoid undesirable off-target effects. iRNA molecules can be modified by chemical conjugation to other groups, e.g., a lipid or carbohydrate group as described herein. Such conjugates can be used to target iRNA to particular cells, e.g., liver cells, e.g., hepatocytes. For example, GalNAc conjugates or lipid (e.g., LNP) formulations can be used to target iRNA to particular cells, e.g., liver cells, e.g., hepatocytes.

[0363] Lipophilic groups such as cholesterol to enhance cellular uptake and prevent degradation. For example, an iRNA directed against ApoB conjugated to a lipophilic cholesterol moiety was injected systemically into mice and resulted in knockdown of apoB mRNA in both the liver and jejunum (Soutschek, J., et al (2004) Nature 432:173-178). Conjugation of an iRNA to an aptamer has been shown to inhibit tumor growth and mediate tumor regression in a mouse model of prostate cancer (McNamara, J O., et al (2006) Nat. Biotechnol. 24:1005-1015). In an alternative embodiment, the iRNA can be delivered using drug delivery systems such as a nanoparticle, a dendrimer, a polymer, liposomes, or a cationic delivery system. Positively charged cationic delivery systems facilitate binding of an iRNA molecule (negatively charged) and also enhance interactions at the negatively charged cell membrane to permit efficient uptake of an iRNA by the cell. Cationic lipids, dendrimers, or polymers can either be bound to an iRNA, or induced to form a vesicle or micelle (see e.g., Kim S H., et al (2008) Journal of Controlled Release 129(2):107-116) that encases an iRNA. The formation of vesicles or micelles further prevents degradation of the iRNA when administered systemically. Methods for making and administering cationic-iRNA complexes are well within the abilities of one skilled in the art (see e.g., Sorensen, D R., et al (2003) J. Mol. Biol 327:761-766; Verma, U N., et al (2003) Clin. Cancer Res. 9:1291-1300; Arnold, A S et al (2007) J. Hypertens. 25:197-205, which are incorporated herein by reference in their entirety). Some non-limiting examples of drug delivery systems useful for systemic delivery of iRNAs include DOTAP (Sorensen, D R., et al (2003), supra; Verma, U N., et al (2003), supra), Oligofectamine, “solid nucleic acid lipid particles” (Zimmermann, T S., et al (2006) Nature 441:111-114), cardiolipin (Chien, P Y., et al (2005) Cancer Gene Ther. 12:321-328; Pal, A., et al (2005) Int J. Oncol. 26:1087-1091), polyethyleneimine (Bonnet M E., et al (2008) Pharm. Res. August 16 Epub ahead of print; Aigner, A. (2006) J. Biomed. Biotechnol. 71659), Arg-Gly-Asp (RGD) peptides (Liu, S. (2006) Mol. Pharm. 3:472-487), and polyamidoamines (Tomalia, D A., et al (2007) Biochem. Soc. Trans. 35:61-67; Yoo, H., et al (1999) Pharm. Res. 16:1799-1804). In some embodiments, an iRNA forms a complex with cyclodextrin for systemic administration. Methods for administration and pharmaceutical compositions of iRNAs and cyclodextrins can be found in U.S. Pat. No. 7,427,605, which is herein incorporated by reference in its entirety.

Vector Encoded iRNAs

[0364] In another aspect, iRNA targeting the LECT2 gene can be expressed from transcription units inserted into DNA or RNA vectors (see, e.g., Couture, A, et al., TIG. (1996), 12:5-10; Skillern, A., et al., International PCT Publication No. WO 00/22113, Conrad, International PCT Publication No. WO 00/22114, and Conrad, U.S. Pat. No. 6,054,299). Expression can be transient (on the order of hours to weeks) or sustained (weeks to months or longer), depending upon the specific construct used and the target tissue or cell type. These transgenes can be introduced as a linear construct, a circular plasmid, or a viral vector, which can be an integrating or non-integrating vector. The transgene can also be constructed to permit it to be inherited as an extrachromosomal plasmid (Gassmann, et al., Proc. Natl. Acad. Sci. USA (1995) 92:1292).

[0365] The individual strand or strands of an iRNA can be transcribed from a promoter on an expression vector. Where two separate strands are to be expressed to generate, for example, a dsRNA, two separate expression vectors can be co-introduced (e.g., by transfection or infection) into a target cell. Alternatively each individual strand of a dsRNA can be transcribed by promoters both of which are located on the same expression plasmid. In one embodiment, a dsRNA is expressed as an inverted repeat joined by a linker polynucleotide sequence such that the dsRNA has a stem and loop structure.

[0366] An iRNA expression vector is typically a DNA plasmid or viral vector. An expression vector compatible with eukaryotic cells, e.g., with vertebrate cells, can be used to produce recombinant constructs for the expression of an iRNA as described herein. Eukaryotic cell expression vectors are well known in the art and are available from a number of commercial sources. Typically, such vectors contain convenient restriction sites for insertion of the desired nucleic acid segment. Delivery of iRNA expressing vectors can be systemic, such as by intravenous or intramuscular administration, by administration to target cells ex-planted from the patient followed by reintroduction into the patient, or by any other means that allows for introduction into a desired target cell.

[0367] An iRNA expression plasmid can be transfected into a target cell as a complex with a cationic lipid carrier (e.g., Oligofectamine) or a non-cationic lipid-based carrier (e.g., Transit-TKO™). Multiple lipid transfections for iRNA-mediated knockdowns targeting different regions of a target RNA over a period of a week or more are also contemplated by the invention. Successful introduction of vectors into host cells can be monitored using various known methods. For example, transient transfection can be signaled with a reporter, such as a fluorescent marker, such as Green Fluorescent Protein (GFP). Stable transfection of cells ex vivo can be ensured using markers that provide the transfected cell with resistance to specific environmental factors (e.g., antibiotics and drugs), such as hygromycin B resistance.

[0368] Viral vector systems which can be utilized with the methods and compositions described herein include, but are not limited to, (a) adenovirus vectors; (b) retrovirus vectors, including but not limited to lentiviral vectors, moloney murine leukemia virus, etc.; (c) adeno-associated virus vectors; (d) herpes simplex virus vectors; (e) SV40 vectors; (f) polyoma virus vectors; (g) papilloma virus vectors; (h) picornavirus vectors; (i) pox virus vectors such as an orthopox, e.g., vaccinia virus vectors or avipox, e.g. canary pox or fowl pox; and (j) a helper-dependent or gutless adenovirus. Replication-defective viruses can also be advantageous. Different vectors will or will not become incorporated into the cells' genome. The constructs can include viral sequences for transfection, if desired. Alternatively, the construct may be incorporated into vectors capable of episomal replication, e.g EPV and EBV vectors. Constructs for the recombinant expression of an iRNA will generally require regulatory elements, e.g., promoters, enhancers, etc., to ensure the expression of the iRNA in target cells. Other aspects to consider for vectors and constructs are further described below.

[0369] Vectors useful for the delivery of an iRNA will include regulatory elements (promoter, enhancer, etc.) sufficient for expression of the iRNA in the desired target cell or tissue. The regulatory elements can be chosen to provide either constitutive or regulated/inducible expression.

[0370] Expression of the iRNA can be precisely regulated, for example, by using an inducible regulatory sequence that is sensitive to certain physiological regulators, e.g., circulating glucose levels, or hormones (Docherty et al., 1994, FASEB J. 8:20-24). Such inducible expression systems, suitable for the control of dsRNA expression in cells or in mammals include, for example, regulation by ecdysone, by estrogen, progesterone, tetracycline, chemical inducers of dimerization, and isopropyl-β-D1-thiogalactopyranoside (IPTG). A person skilled in the art would be able to choose the appropriate regulatory/promoter sequence based on the intended use of the iRNA transgene.

[0371] In a specific embodiment, viral vectors that contain nucleic acid sequences encoding an iRNA can be used. For example, a retroviral vector can be used (see Miller et al., Meth. Enzymol. 217:581-599 (1993)). These retroviral vectors contain the components necessary for the correct packaging of the viral genome and integration into the host cell DNA. The nucleic acid sequences encoding an iRNA are cloned into one or more vectors, which facilitates delivery of the nucleic acid into a patient. More detail about retroviral vectors can be found, for example, in Boesen et al., Biotherapy 6:291-302 (1994), which describes the use of a retroviral vector to deliver the mdr1 gene to hematopoietic stem cells in order to make the stem cells more resistant to chemotherapy. Other references illustrating the use of retroviral vectors in gene therapy are: Clowes et al., J. Clin. Invest. 93:644-651 (1994); Kiem et al., Blood 83:1467-1473 (1994); Salmons and Gunzberg, Human Gene Therapy 4:129-141 (1993); and Grossman and Wilson, Curr. Opin. in Genetics and Devel. 3:110-114 (1993). Lentiviral vectors contemplated for use include, for example, the HIV based vectors described in U.S. Pat. Nos. 6,143,520; 5,665,557; and 5,981,276, which are herein incorporated by reference.

[0372] Adenoviruses are also contemplated for use in delivery of iRNAs. Adenoviruses are especially attractive vehicles, e.g., for delivering genes to respiratory epithelia. Adenoviruses naturally infect respiratory epithelia where they cause a mild disease. Other targets for adenovirus-based delivery systems are liver, the central nervous system, endothelial cells, and muscle. Adenoviruses have the advantage of being capable of infecting non-dividing cells. Kozarsky and Wilson, Current Opinion in Genetics and Development 3:499-503 (1993) present a review of adenovirus-based gene therapy. Bout et al., Human Gene Therapy 5:3-10 (1994) demonstrated the use of adenovirus vectors to transfer genes to the respiratory epithelia of rhesus monkeys. Other instances of the use of adenoviruses in gene therapy can be found in Rosenfeld et al., Science 252:431-434 (1991); Rosenfeld et al., Cell 68:143-155 (1992); Mastrangeli et al., J. Clin. Invest. 91:225-234 (1993); PCT Publication WO94/12649; and Wang, et al., Gene Therapy 2:775-783 (1995). A suitable AV vector for expressing an iRNA featured in the invention, a method for constructing the recombinant AV vector, and a method for delivering the vector into target cells, are described in Xia H et al. (2002), Nat. Biotech. 20: 1006-1010.

[0373] Use of Adeno-associated virus (AAV) vectors is also contemplated (Walsh et al., Proc. Soc. Exp. Biol. Med. 204:289-300 (1993); U.S. Pat. No. 5,436,146). In one embodiment, the iRNA can be expressed as two separate, complementary single-stranded RNA molecules from a recombinant AAV vector having, for example, either the U6 or H1 RNA promoters, or the cytomegalovirus (CMV) promoter. Suitable AAV vectors for expressing the dsRNA featured in the invention, methods for constructing the recombinant AV vector, and methods for delivering the vectors into target cells are described in Samulski R et al. (1987), J. Virol. 61: 3096-3101; Fisher K J et al. (1996), J. Virol., 70: 520-532; Samulski R et al. (1989), J. Virol. 63: 3822-3826; U.S. Pat. Nos. 5,252,479; 5,139,941; International Patent Application No. WO 94/13788; and International Patent Application No. WO 93/24641, the entire disclosures of which are herein incorporated by reference.

[0374] Another typical viral vector is a pox virus such as a vaccinia virus, for example an attenuated vaccinia such as Modified Virus Ankara (MVA) or NYVAC, an avipox such as fowl pox or canary pox.

[0375] The tropism of viral vectors can be modified by pseudotyping the vectors with envelope proteins or other surface antigens from other viruses, or by substituting different viral capsid proteins, as appropriate. For example, lentiviral vectors can be pseudotyped with surface proteins from vesicular stomatitis virus (VSV), rabies, Ebola, Mokola, and the like. AAV vectors can be made to target different cells by engineering the vectors to express different capsid protein serotypes; see, e.g., Rabinowitz J E et al. (2002), J Virol 76:791-801, the entire disclosure of which is herein incorporated by reference.

[0376] The pharmaceutical preparation of a vector can include the vector in an acceptable diluent, or can include a slow release matrix in which the gene delivery vehicle is imbedded. Alternatively, where the complete gene delivery vector can be produced intact from recombinant cells, e.g., retroviral vectors, the pharmaceutical preparation can include one or more cells which produce the gene delivery system.

### III. Pharmaceutical Compositions Containing iRNA

[0377] In one embodiment, the invention provides pharmaceutical compositions containing an iRNA, as described herein, and a pharmaceutically acceptable carrier. The pharmaceutical composition containing the iRNA is useful for treating a disease or disorder related to the expression or activity of a LECT2 gene (e.g., a LECT2 amyloidosis). Such pharmaceutical compositions are formulated based on the mode of delivery. For example, compositions can be formulated for systemic administration via parenteral delivery, e.g., by intravenous (IV) delivery. In some embodiments, a composition provided herein (e.g., an LNP formulation) is formulated for intravenous delivery. In some embodiments, a composition provided herein (e.g., a composition comprising a GalNAc conjugate) is formulated for subcutaneous delivery.

[0378] The pharmaceutical compositions featured herein are administered in a dosage sufficient to inhibit expression of a LECT2 gene. In general, a suitable dose of iRNA will be in the range of 0.01 to 200.0 milligrams per kilogram body weight of the recipient per day, generally in the range of 1 to 50 mg per kilogram body weight per day. For example, the dsRNA can be administered at 0.05 mg/kg, 0.5 mg/kg, 1 mg/kg, 1.5 mg/kg, 2 mg/kg, 3 mg/kg, 10 mg/kg, 20 mg/kg, 30 mg/kg, 40 mg/kg, or 50 mg/kg per single dose. The pharmaceutical composition may be administered once daily, or the iRNA may be administered as two, three, or more sub-doses at appropriate intervals throughout the day or even using continuous infusion or delivery through a controlled release formulation. In that case, the iRNA contained in each sub-dose must be correspondingly smaller in order to achieve the total daily dosage. The dosage unit can also be compounded for delivery over several days, e.g., using a conventional sustained release formulation which provides sustained release of the iRNA over a several day period. Sustained release formulations are well known in the art and are particularly useful for delivery of agents at a particular site, such as can be used with the agents of the present invention. In this embodiment, the dosage unit contains a corresponding multiple of the daily dose.

[0379] The effect of a single dose on LECT2 levels can be long lasting, such that subsequent doses are administered at not more than 3, 4, or 5 day intervals, or at not more than 1, 2, 3, or 4 week intervals.

[0380] The skilled artisan will appreciate that certain factors may influence the dosage and timing required to effectively treat a subject, including but not limited to the severity of the disease or disorder, previous treatments, the general health and/or age of the subject, and other diseases present. Moreover, treatment of a subject with a therapeutically effective amount of a composition can include a single treatment or a series of treatments. Estimates of effective dosages and in vivo half-lives for the individual iRNAs encompassed by the invention can be made using conventional methodologies or on the basis of in vivo testing using a suitable animal model.

[0381] A suitable animal model, e.g., a mouse containing a transgene expressing human LECT2, can be used to determine the therapeutically effective dose and/or an effective dosage regimen administration of LECT2 siRNA.

[0382] The present disclosure also includes pharmaceutical compositions and formulations that include the iRNA compounds featured herein. The pharmaceutical compositions of the present invention may be administered in a number of ways depending upon whether local or systemic treatment is desired and upon the area to be treated. Administration may be topical (e.g., by a transdermal patch), pulmonary, e.g., by inhalation or insufflation of powders or aerosols, including by nebulizer; intratracheal, intranasal, epidermal and transdermal, oral or parenteral. Parenteral administration includes intravenous, intraarterial, subcutaneous, intraperitoneal or intramuscular injection or infusion; subdermal, e.g., via an implanted device; or intracranial, e.g., by intraparenchymal, intrathecal or intraventricular, administration.

[0383] The iRNA can be delivered in a manner to target a particular tissue, such as a tissue that produces erythrocytes. For example, the iRNA can be delivered to bone marrow, liver (e.g., hepatocyes of liver), lymph glands, spleen, lungs (e.g., pleura of lungs) or spine. In one embodiment, the iRNA is delivered to bone marrow.

[0384] Pharmaceutical compositions and formulations for topical administration may include transdermal patches, ointments, lotions, creams, gels, drops, suppositories, sprays, liquids and powders. Conventional pharmaceutical carriers, aqueous, powder or oily bases, thickeners and the like may be necessary or desirable. Coated condoms, gloves and the like may also be useful. Suitable topical formulations include those in which the iRNAs featured in the invention are in admixture with a topical delivery agent such as lipids, liposomes, fatty acids, fatty acid esters, steroids, chelating agents and surfactants. Suitable lipids and liposomes include neutral (e.g., dioleoylphosphatidyl DOPE ethanolamine, dimyristoylphosphatidyl choline DMPC, distearolyphosphatidyl choline) negative (e.g., dimyristoylphosphatidyl glycerol DMPG) and cationic (e.g., dioleoyltetramethylaminopropyl DOTAP and dioleoylphosphatidyl ethanolamine DOTMA). iRNAs featured in the invention may be encapsulated within liposomes or may form complexes thereto, in particular to cationic liposomes. Alternatively, iRNAs may be complexed to lipids, in particular to cationic lipids. Suitable fatty acids and esters include but are not limited to arachidonic acid, oleic acid, eicosanoic acid, lauric acid, caprylic acid, capric acid, myristic acid, palmitic acid, stearic acid, linoleic acid, linolenic acid, dicaprate, tricaprate, monoolein, dilaurin, glyceryl 1-monocaprate, 1-dodecylazacycloheptan-2-one, an acylcarnitine, an acylcholine, or a C₁₋₂₀ alkyl ester (e.g., isopropylmyristate IPM), monoglyceride, diglyceride or pharmaceutically acceptable salt thereof. Topical formulations are described in detail in U.S. Pat. No. 6,747,014, which is incorporated herein by reference.

### Liposomal Formulations

[0385] There are many organized surfactant structures besides microemulsions that have been studied and used for the formulation of drugs. These include monolayers, micelles, bilayers and vesicles. Vesicles, such as liposomes, have attracted great interest because of their specificity and the duration of action they offer from the standpoint of drug delivery. As used in the present invention, the term “liposome” means a vesicle composed of amphiphilic lipids arranged in a spherical bilayer or bilayers.

[0386] Liposomes are unilamellar or multilamellar vesicles which have a membrane formed from a lipophilic material and an aqueous interior. The aqueous portion contains the composition to be delivered. Cationic liposomes possess the advantage of being able to fuse to the cell wall. Non-cationic liposomes, although not able to fuse as efficiently with the cell wall, are taken up by macrophages in vivo.

[0387] In order to traverse intact mammalian skin, lipid vesicles must pass through a series of fine pores, each with a diameter less than 50 nm, under the influence of a suitable transdermal gradient. Therefore, it is desirable to use a liposome which is highly deformable and able to pass through such fine pores.

[0388] Further advantages of liposomes include; liposomes obtained from natural phospholipids are biocompatible and biodegradable; liposomes can incorporate a wide range of water and lipid soluble drugs; liposomes can protect encapsulated drugs in their internal compartments from metabolism and degradation (Rosoff, in Pharmaceutical Dosage Forms, Lieberman, Rieger and Banker (Eds.), 1988, Marcel Dekker, Inc., New York, N.Y., volume 1, p. 245). Important considerations in the preparation of liposome formulations are the lipid surface charge, vesicle size and the aqueous volume of the liposomes.

[0389] Liposomes are useful for the transfer and delivery of active ingredients to the site of action. Because the liposomal membrane is structurally similar to biological membranes, when liposomes are applied to a tissue, the liposomes start to merge with the cellular membranes and as the merging of the liposome and cell progresses, the liposomal contents are emptied into the cell where the active agent may act.

[0390] Liposomal formulations have been the focus of extensive investigation as the mode of delivery for many drugs. There is growing evidence that for topical administration, liposomes present several advantages over other formulations. Such advantages include reduced side-effects related to high systemic absorption of the administered drug, increased accumulation of the administered drug at the desired target, and the ability to administer a wide variety of drugs, both hydrophilic and hydrophobic, into the skin.

[0391] Several reports have detailed the ability of liposomes to deliver agents including high-molecular weight DNA into the skin. Compounds including analgesics, antibodies, hormones and high-molecular weight DNAs have been administered to the skin. The majority of applications resulted in the targeting of the upper epidermis

[0392] Liposomes fall into two broad classes. Cationic liposomes are positively charged liposomes which interact with the negatively charged DNA molecules to form a stable complex. The positively charged DNA/liposome complex binds to the negatively charged cell surface and is internalized in an endosome. Due to the acidic pH within the endosome, the liposomes are ruptured, releasing their contents into the cell cytoplasm (Wang et al., Biochem. Biophys. Res. Commun., 1987, 147, 980-985).

[0393] Liposomes which are pH-sensitive or negatively-charged, entrap DNA rather than complex with it. Since both the DNA and the lipid are similarly charged, repulsion rather than complex formation occurs. Nevertheless, some DNA is entrapped within the aqueous interior of these liposomes. pH-sensitive liposomes have been used to deliver DNA encoding the thymidine kinase gene to cell monolayers in culture. Expression of the exogenous gene was detected in the target cells (Zhou et al., Journal of Controlled Release, 1992, 19, 269-274).

[0394] One major type of liposomal composition includes phospholipids other than naturally-derived phosphatidylcholine. Neutral liposome compositions, for example, can be formed from dimyristoyl phosphatidylcholine (DMPC) or dipalmitoyl phosphatidylcholine (DPPC). Anionic liposome compositions generally are formed from dimyristoyl phosphatidylglycerol, while anionic fusogenic liposomes are formed primarily from dioleoyl phosphatidylethanolamine (DOPE). Another type of liposomal composition is formed from phosphatidylcholine (PC) such as, for example, soybean PC, and egg PC. Another type is formed from mixtures of phospholipid and/or phosphatidylcholine and/or cholesterol.

[0395] Several studies have assessed the topical delivery of liposomal drug formulations to the skin. Application of liposomes containing interferon to guinea pig skin resulted in a reduction of skin herpes sores while delivery of interferon via other means (e.g., as a solution or as an emulsion) were ineffective (Weiner et al., Journal of Drug Targeting, 1992, 2, 405-410). Further, an additional study tested the efficacy of interferon administered as part of a liposomal formulation to the administration of interferon using an aqueous system, and concluded that the liposomal formulation was superior to aqueous administration (du Plessis et al., Antiviral Research, 1992, 18, 259-265).

[0396] Non-ionic liposomal systems have also been examined to determine their utility in the delivery of drugs to the skin, in particular systems comprising non-ionic surfactant and cholesterol. Non-ionic liposomal formulations comprising Novasome™ I (glyceryl dilaurate/cholesterol/polyoxyethylene-10-stearyl ether) and Novasome™ II (glyceryl distearate/cholesterol/polyoxyethylene-10-stearyl ether) were used to deliver cyclosporin-A into the dermis of mouse skin. Results indicated that such non-ionic liposomal systems were effective in facilitating the deposition of cyclosporin-A into different layers of the skin (Hu et al. S.T.P. Pharma. Sci., 1994, 4, 6, 466).

[0397] Liposomes also include “sterically stabilized” liposomes, a term which, as used herein, refers to liposomes comprising one or more specialized lipids that, when incorporated into liposomes, result in enhanced circulation lifetimes relative to liposomes lacking such specialized lipids. Examples of sterically stabilized liposomes are those in which part of the vesicle-forming lipid portion of the liposome (A) comprises one or more glycolipids, such as monosialoganglioside G_{M1}, or (B) is derivatized with one or more hydrophilic polymers, such as a polyethylene glycol (PEG) moiety. While not wishing to be bound by any particular theory, it is thought in the art that, at least for sterically stabilized liposomes containing gangliosides, sphingomyelin, or PEG-derivatized lipids, the enhanced circulation half-life of these sterically stabilized liposomes derives from a reduced uptake into cells of the reticuloendothelial system (RES) (Allen et al., FEBS Letters, 1987, 223, 42; Wu et al., Cancer Research, 1993, 53, 3765).

[0398] Various liposomes comprising one or more glycolipids are known in the art. Papahadjopoulos et al. (Ann. N.Y. Acad. Sci., 1987, 507, 64) reported the ability of monosialoganglioside G_{M1}, galactocerebroside sulfate and phosphatidylinositol to improve blood half-lives of liposomes. These findings were expounded upon by Gabizon et al. (Proc. Natl. Acad. Sci. U.S.A., 1988, 85, 6949). U.S. Pat. No. 4,837,028 and WO 88/04924, both to Allen et al., disclose liposomes comprising (1) sphingomyelin and (2) the ganglioside G_{M1} or a galactocerebroside sulfate ester. U.S. Pat. No. 5,543,152 (Webb et al.) discloses liposomes comprising sphingomyelin. Liposomes comprising 1,2-sn-dimyristoylphosphatidylcholine are disclosed in WO 97/13499 (Lim et al).

[0399] Many liposomes comprising lipids derivatized with one or more hydrophilic polymers, and methods of preparation thereof, are known in the art. Sunamoto et al. (Bull. Chem. Soc. Jpn., 1980, 53, 2778) described liposomes comprising a nonionic detergent, 2C_{1215G}, that contains a PEG moiety. Illum et al. (FEBS Lett., 1984, 167, 79) noted that hydrophilic coating of polystyrene particles with polymeric glycols results in significantly enhanced blood half-lives. Synthetic phospholipids modified by the attachment of carboxylic groups of polyalkylene glycols (e.g., PEG) are described by Sears (U.S. Pat. Nos. 4,426,330 and 4,534,899). Klibanov et al. (FEBS Lett., 1990, 268, 235) described experiments demonstrating that liposomes comprising phosphatidylethanolamine (PE) derivatized with PEG or PEG stearate have significant increases in blood circulation half-lives. Blume et al. (Biochimica et Biophysica Acta, 1990, 1029, 91) extended such observations to other PEG-derivatized phospholipids, e.g., DSPE-PEG, formed from the combination of distearoylphosphatidylethanolamine (DSPE) and PEG. Liposomes having covalently bound PEG moieties on their external surface are described in European Patent No. EP 0 445 131 B1 and WO 90/04384 to Fisher. Liposome compositions containing 1-20 mole percent of PE derivatized with PEG, and methods of use thereof, are described by Woodle et al. (U.S. Pat. Nos. 5,013,556 and 5,356,633) and Martin et al. (U.S. Pat. No. 5,213,804 and European Patent No. EP 0 496 813 B1). Liposomes comprising a number of other lipid-polymer conjugates are disclosed in WO 91/05545 and U.S. Pat. No. 5,225,212 (both to Martin et al.) and in WO 94/20073 (Zalipsky et al.). Liposomes comprising PEG-modified ceramide lipids are described in WO 96/10391 (Choi et al). U.S. Pat. No. 5,540,935 (Miyazaki et al.) and U.S. Pat. No. 5,556,948 (Tagawa et al.) describe PEG-containing liposomes that can be further derivatized with functional moieties on their surfaces.

[0400] A number of liposomes comprising nucleic acids are known in the art. WO 96/40062 to Thierry et al. discloses methods for encapsulating high molecular weight nucleic acids in liposomes. U.S. Pat. No. 5,264,221 to Tagawa et al. discloses protein-bonded liposomes and asserts that the contents of such liposomes may include a dsRNA. U.S. Pat. No. 5,665,710 to Rahman et al. describes certain methods of encapsulating oligodeoxynucleotides in liposomes. WO 97/04787 to Love et al. discloses liposomes comprising dsRNAs targeted to the raf gene.

[0401] Transfersomes are yet another type of liposomes, and are highly deformable lipid aggregates which are attractive candidates for drug delivery vehicles. Transfersomes may be described as lipid droplets which are so highly deformable that they are easily able to penetrate through pores which are smaller than the droplet. Transfersomes are adaptable to the environment in which they are used, e.g., they are self-optimizing (adaptive to the shape of pores in the skin), self-repairing, frequently reach their targets without fragmenting, and often self-loading. To make transfersomes it is possible to add surface edge-activators, usually surfactants, to a standard liposomal composition. Transfersomes have been used to deliver serum albumin to the skin. The transfersome-mediated delivery of serum albumin has been shown to be as effective as subcutaneous injection of a solution containing serum albumin.

[0402] Surfactants find wide application in formulations such as emulsions (including microemulsions) and liposomes. The most common way of classifying and ranking the properties of the many different types of surfactants, both natural and synthetic, is by the use of the hydrophile/lipophile balance (HLB). The nature of the hydrophilic group (also known as the “head”) provides the most useful means for categorizing the different surfactants used in formulations (Rieger, in Pharmaceutical Dosage Forms, Marcel Dekker, Inc., New York, N.Y., 1988, p. 285).

[0403] If the surfactant molecule is not ionized, it is classified as a nonionic surfactant. Nonionic surfactants find wide application in pharmaceutical and cosmetic products and are usable over a wide range of pH values. In general their HLB values range from 2 to about 18 depending on their structure. Nonionic surfactants include nonionic esters such as ethylene glycol esters, propylene glycol esters, glyceryl esters, polyglyceryl esters, sorbitan esters, sucrose esters, and ethoxylated esters. Nonionic alkanolamides and ethers such as fatty alcohol ethoxylates, propoxylated alcohols, and ethoxylated/propoxylated block polymers are also included in this class. The polyoxyethylene surfactants are the most popular members of the nonionic surfactant class.

[0404] If the surfactant molecule carries a negative charge when it is dissolved or dispersed in water, the surfactant is classified as anionic. Anionic surfactants include carboxylates such as soaps, acyl lactylates, acyl amides of amino acids, esters of sulfuric acid such as alkyl sulfates and ethoxylated alkyl sulfates, sulfonates such as alkyl benzene sulfonates, acyl isethionates, acyl taurates and sulfosuccinates, and phosphates. The most important members of the anionic surfactant class are the alkyl sulfates and the soaps.

[0405] If the surfactant molecule carries a positive charge when it is dissolved or dispersed in water, the surfactant is classified as cationic. Cationic surfactants include quaternary ammonium salts and ethoxylated amines. The quaternary ammonium salts are the most used members of this class.

[0406] If the surfactant molecule has the ability to carry either a positive or negative charge, the surfactant is classified as amphoteric. Amphoteric surfactants include acrylic acid derivatives, substituted alkylamides, N-alkylbetaines and phosphatides.

[0407] The use of surfactants in drug products, formulations and in emulsions has been reviewed (Rieger, in Pharmaceutical Dosage Forms, Marcel Dekker, Inc., New York, N.Y., 1988, p. 285).

### Nucleic Acid Lipid Particles

[0408] In one embodiment, a LECT2 dsRNA featured in the invention is fully encapsulated in the lipid formulation, e.g., to form a SPLP, pSPLP, SNALP, or other nucleic acid-lipid particle. As used herein, the term “SNALP” refers to a stable nucleic acid-lipid particle, including SPLP. As used herein, the term “SPLP” refers to a nucleic acid-lipid particle comprising plasmid DNA encapsulated within a lipid vesicle. SNALPs and SPLPs typically contain a cationic lipid, a non-cationic lipid, and a lipid that prevents aggregation of the particle (e.g., a PEG-lipid conjugate). SNALPs and SPLPs are extremely useful for systemic applications, as they exhibit extended circulation lifetimes following intravenous (i.v.) injection and accumulate at distal sites (e.g., sites physically separated from the administration site). SPLPs include “pSPLP,” which include an encapsulated condensing agent-nucleic acid complex as set forth in PCT Publication No. WO 00/03683. The particles of the present invention typically have a mean diameter of about 50 nm to about 150 nm, more typically about 60 nm to about 130 nm, more typically about 70 nm to about 110 nm, most typically about 70 nm to about 90 nm, and are substantially nontoxic. In addition, the nucleic acids when present in the nucleic acid-lipid particles of the present invention are resistant in aqueous solution to degradation with a nuclease. Nucleic acid-lipid particles and their method of preparation are disclosed in, e.g., U.S. Pat. Nos. 5,976,567; 5,981,501; 6,534,484; 6,586,410; 6,815,432; and PCT Publication No. WO 96/40964.

[0409] In one embodiment, the lipid to drug ratio (mass/mass ratio) (e.g., lipid to dsRNA ratio) will be in the range of from about 1:1 to about 50:1, from about 1:1 to about 25:1, from about 3:1 to about 15:1, from about 4:1 to about 10:1, from about 5:1 to about 9:1, or about 6:1 to about 9:1.

[0410] The cationic lipid may be, for example, N,N-dioleyl-N,N-dimethylammonium chloride (DODAC), N,N-distearyl-N,N-dimethylammonium bromide (DDAB), N—(I-(2,3-dioleoyloxy)propyl)-N,N,N-trimethylammonium chloride (DOTAP), N—(I-(2,3-dioleyloxy)propyl)-N,N,N-trimethylammonium chloride (DOTMA), N,N-dimethyl-2,3-dioleyloxy)propylamine (DODMA), 1,2-DiLinoleyloxy-N,N-dimethylaminopropane (DLinDMA), 1,2-Dilinolenyloxy-N,N-dimethylaminopropane (DLenDMA), 1,2-Dilinoleylcarbamoyloxy-3-dimethylaminopropane (DLin-C-DAP), 1,2-Dilinoleyoxy-3-(dimethylamino)acetoxypropane (DLin-DAC), 1,2-Dilinoleyoxy-3-morpholinopropane (DLin-MA), 1,2-Dilinoleoyl-3-dimethylaminopropane (DLinDAP), 1,2-Dilinoleylthio-3-dimethylaminopropane (DLin-S-DMA), 1-Linoleoyl-2-linoleyloxy-3-dimethylaminopropane (DLin-2-DMAP), 1,2-Dilinoleyloxy-3-trimethylaminopropane chloride salt (DLin-TMA·C1), 1,2-Dilinoleoyl-3-trimethylaminopropane chloride salt (DLin-TAP·C1), 1,2-Dilinoleyloxy-3-(N-methylpiperazino)propane (DLin-MPZ), or 3-(N,N-Dilinoleylamino)-1,2-propanediol (DLinAP), 3-(N,N-Dioleylamino)-1,2-propanedio (DOAP), 1,2-Dilinoleyloxo-3-(2-N,N-dimethylamino)ethoxypropane (DLin-EG-DMA), 1,2-Dilinolenyloxy-N,N-dimethylaminopropane (DLinDMA), 2,2-Dilinoleyl-4-dimethylaminomethyl-[1,3]-dioxolane (DLin-K-DMA) or analogs thereof, (3aR,5s,6aS)—N,N-dimethyl-2,2-di((9Z,12Z)-octadeca-9,12-dienyl)tetrahydro-3aH-cyclopenta[d][1,3]dioxol-5-amine (ALN100), (6Z,9Z,28Z,31Z)-heptatriaconta-6,9,28,31-tetraen-19-yl 4-(dimethylamino)butanoate (MC3), 1,1′-(2-(4-(2-((2-(bis(2-hydroxydodecyl)amino)ethyl)(2-hydroxydodecyl)amino)ethyl)piperazin-1-yl)ethylazanediyl)didodecan-2-ol (Tech G1), or a mixture thereof. The cationic lipid may comprise from about 20 mol % to about 50 mol % or about 40 mol % of the total lipid present in the particle.

[0411] In another embodiment, the compound 2,2-Dilinoleyl-4-dimethylaminoethyl-[1,3]-dioxolane can be used to prepare lipid-siRNA nanoparticles. Synthesis of 2,2-Dilinoleyl-4-dimethylaminoethyl-[1,3]-dioxolane is described in U.S. provisional patent application No. 61/107,998 filed on Oct. 23, 2008, which is herein incorporated by reference.

[0412] In one embodiment, the lipid-siRNA particle includes 40% 2, 2-Dilinoleyl-4-dimethylaminoethyl-[1,3]-dioxolane: 10% DSPC: 40% Cholesterol: 10% PEG-C-DOMG (mole percent) with a particle size of 63.0±20 nm and a 0.027 siRNA/Lipid Ratio.

[0413] The non-cationic lipid may be an anionic lipid or a neutral lipid including, but not limited to, distearoylphosphatidylcholine (DSPC), dioleoylphosphatidylcholine (DOPC), dipalmitoylphosphatidylcholine (DPPC), dioleoylphosphatidylglycerol (DOPG), dipalmitoylphosphatidylglycerol (DPPG), dioleoyl-phosphatidylethanolamine (DOPE), palmitoyloleoylphosphatidylcholine (POPC), palmitoyloleoylphosphatidylethanolamine (POPE), dioleoyl-phosphatidylethanolamine 4-(N-maleimidomethyl)-cyclohexane-1-carboxylate (DOPE-mal), dipalmitoyl phosphatidyl ethanolamine (DPPE), dimyristoylphosphoethanolamine (DMPE), distearoyl-phosphatidyl-ethanolamine (DSPE), 16-O-monomethyl PE, 16-O-dimethyl PE, 18-1-trans PE, 1-stearoyl-2-oleoyl-phosphatidyethanolamine (SOPE), cholesterol, or a mixture thereof. The non-cationic lipid may be from about 5 mol % to about 90 mol %, about 10 mol %, or about 58 mol % if cholesterol is included, of the total lipid present in the particle.

[0414] The conjugated lipid that inhibits aggregation of particles may be, for example, a polyethyleneglycol (PEG)-lipid including, without limitation, a PEG-diacylglycerol (DAG), a PEG-dialkyloxypropyl (DAA), a PEG-phospholipid, a PEG-ceramide (Cer), or a mixture thereof. The PEG-DAA conjugate may be, for example, a PEG-dilauryloxypropyl (Ci₂), a PEG-dimyristyloxypropyl (Ci₄), a PEG-dipalmityloxypropyl (Ci₆), or a PEG-distearyloxypropyl (C]₈). The conjugated lipid that prevents aggregation of particles may be from 0 mol % to about 20 mol % or about 2 mol % of the total lipid present in the particle.

[0415] In some embodiments, the nucleic acid-lipid particle further includes cholesterol at, e.g., about 10 mol % to about 60 mol % or about 48 mol % of the total lipid present in the particle.

[0416] In some embodiments, the iRNA is formulated in a lipid nanoparticle (LNP).

### LNP01

[0417] In one embodiment, the lipidoid ND98·4HCl (MW 1487) (see U.S. patent application Ser. No. 12/056,230, filed Mar. 26, 2008, which is herein incorporated by reference), Cholesterol (Sigma-Aldrich), and PEG-Ceramide C16 (Avanti Polar Lipids) can be used to prepare lipid-dsRNA nanoparticles (e.g., LNP01 particles). Stock solutions of each in ethanol can be prepared as follows: ND98, 133 mg/ml; Cholesterol, 25 mg/ml, PEG-Ceramide C16, 100 mg/ml. The ND98, Cholesterol, and PEG-Ceramide C16 stock solutions can then be combined in a, e.g., 42:48:10 molar ratio. The combined lipid solution can be mixed with aqueous dsRNA (e.g., in sodium acetate pH 5) such that the final ethanol concentration is about 35-45% and the final sodium acetate concentration is about 100-300 mM. Lipid-dsRNA nanoparticles typically form spontaneously upon mixing. Depending on the desired particle size distribution, the resultant nanoparticle mixture can be extruded through a polycarbonate membrane (e.g., 100 nm cut-off) using, for example, a thermobarrel extruder, such as Lipex Extruder (Northern Lipids, Inc). In some cases, the extrusion step can be omitted. Ethanol removal and simultaneous buffer exchange can be accomplished by, for example, dialysis or tangential flow filtration. Buffer can be exchanged with, for example, phosphate buffered saline (PBS) at about pH 7, e.g., about pH 6.9, about pH 7.0, about pH 7.1, about pH 7.2, about pH 7.3, or about pH 7.4.

[chemical structure]

[0418] LNP01 formulations are described, e.g., in International Application Publication No. WO 2008/042973, which is hereby incorporated by reference.

[0419] Additional exemplary lipid-dsRNA formulations are provided in the following table.

TABLE 6
Exemplary lipid formulations

| | | cationic lipid/non-cationic |
|---|---|---|
| | | lipid/cholesterol/PEG-lipid conjugate |
| | Cationic Lipid | Lipid:siRNA ratio |
| SNALP | 1,2-Dilinolenyloxy-N,N- | DLinDMA/DPPC/Cholesterol/PEG- |
| | dimethylaminopropane (DLinDMA) | cDMA |
| | | (57.1/7.1/34.4/1.4) |
| | | lipid:siRNA ~7:1 |
| S-XTC | 2,2-Dilinoleyl-4-dimethylaminoethyl- | XTC/DPPC/Cholesterol/PEG-cDMA |
| | [1,3]-dioxolane (XTC) | 57.1/7.1/34.4/1.4 |
| | | lipid:siRNA ~7:1 |
| LNP05 | 2,2-Dilinoleyl-4-dimethylaminoethyl- | XTC/DSPC/Cholesterol/PEG-DMG |
| | [1,3]-dioxolane (XTC) | 57.5/7.5/31.5/3.5 |
| | | lipid:siRNA ~6:1 |
| LNP06 | 2,2-Dilinoleyl-4-dimethylaminoethyl- | XTC/DSPC/Cholesterol/PEG-DMG |
| | [1,3]-dioxolane (XTC) | 57.5/7.5/31.5/3.5 |
| | | lipid:siRNA ~11:1 |
| LNP07 | 2,2-Dilinoleyl-4-dimethylaminoethyl- | XTC/DSPC/Cholesterol/PEG-DMG |
| | [1,3]-dioxolane (XTC) | 60/7.5/31/1.5, |
| | | lipid:siRNA ~6:1 |
| LNP08 | 2,2-Dilinoleyl-4-dimethylaminoethyl- | XTC/DSPC/Cholesterol/PEG-DMG |
| | [1,3]-dioxolane (XTC) | 60/7.5/31/1.5, |
| | | lipid:siRNA ~11:1 |
| LNP09 | 2,2-Dilinoleyl-4-dimethylaminoethyl- | XTC/DSPC/Cholesterol/PEG-DMG |
| | [1,3]-dioxolane (XTC) | 50/10/38.5/1.5 |
| | | Lipid:siRNA 10:1 |
| LNP10 | (3aR,5s,6aS)-N,N-dimethyl-2,2- | ALN100/DSPC/Cholesterol/PEG-DMG |
| | di((9Z,12Z)-octadeca-9,12- | 50/10/38.5/1.5 |
| | dienyl)tetrahydro-3aH- | Lipid:siRNA 10:1 |
| | cyclopenta[d][1,3]dioxol-5-amine | |
| | (ALN100) | |
| LNP11 | (6Z,9Z,28Z,31Z)-heptatriaconta- | MC-3/DSPC/Cholesterol/PEG-DMG |
| | 6,9,28,31-tetraen-19-yl 4- | 50/10/38.5/1.5 |
| | (dimethylamino)butanoate (MC3) | Lipid:siRNA 10:1 |
| LNP12 | 1,1′-(2-(4-(2-((2-(bis(2- | C12-200/DSPC/Cholesterol/PEG-DMG |
| | hydroxydodecyl)amino)ethyl)(2- | 50/10/38.5/1.5 |
| | hydroxydodecyl)amino)ethyl)piperazin- | Lipid:siRNA 10:1 |
| | 1-yl)ethylazanediyl)didodecan-2-ol | |
| | (C12-200) | |
| LNP13 | XTC | XTC/DSPC/Chol/PEG-DMG |
| | | 50/10/38.5/1.5 |
| | | Lipid:siRNA: 33:1 |
| LNP14 | MC3 | MC3/DSPC/Chol/PEG-DMG |
| | | 40/15/40/5 |
| | | Lipid:siRNA: 11:1 |
| LNP15 | MC3 | MC3/DSPC/Chol/PEG-DSG/GalNAc- |
| | | PEG-DSG |
| | | 50/10/35/4.5/0.5 |
| | | Lipid:siRNA: 11:1 |
| LNP16 | MC3 | MC3/DSPC/Chol/PEG-DMG |
| | | 50/10/38.5/1.5 |
| | | Lipid:siRNA: 7:1 |
| LNP17 | MC3 | MC3/DSPC/Chol/PEG-DSG |
| | | 50/10/38.5/1.5 |
| | | Lipid:siRNA: 10:1 |
| LNP18 | MC3 | MC3/DSPC/Chol/PEG-DMG |
| | | 50/10/38.5/1.5 |
| | | Lipid:siRNA: 12:1 |
| LNP19 | MC3 | MC3/DSPC/Chol/PEG-DMG |
| | | 50/10/35/5 |
| | | Lipid:siRNA: 8:1 |
| LNP20 | MC3 | MC3/DSPC/Chol/PEG-DPG |
| | | 50/10/38.5/1.5 |
| | | Lipid:siRNA: 10:1 |
| LNP21 | C12-200 | C12-200/DSPC/Chol/PEG-DSG |
| | | 50/10/38.5/1.5 |
| | | Lipid:siRNA: 7:1 |
| LNP22 | XTC | XTC/DSPC/Chol/PEG-DSG |
| | | 50/10/38.5/1.5 |
| | | Lipid:siRNA: 10:1 |

DSPC: distearoylphosphatidylcholine
DPPC: dipalmitoylphosphatidylcholine
PEG-DMG: PEG-didimyristoyl glycerol (C14-PEG, or PEG-C14) (PEG with avg mol wt of 2000)
PEG-DSG: PEG-distyryl glycerol (C18-PEG, or PEG-C18) (PEG with avg mol wt of 2000)
PEG-cDMA: PEG-carbamoyl-1,2-dimyristyloxypropylamine (PEG with avg mol wt of 2000)
SNALP (1,2-Dilinolenyloxy-N,N-dimethylaminopropane (DLinDMA)) comprising formulations are described in International Publication No. WO2009/127060, filed Apr. 15, 2009, which is hereby incorporated by reference.
XTC comprising formulations are described, e.g., in U.S. Provisional Serial No. 61/148,366, filed Jan. 29, 2009; U.S. Provisional Serial No. 61/156,851, filed Mar. 2, 2009; U.S. Provisional Serial No. 61/185,712, filed Jun. 10, 2009; U.S. Provisional Serial No. 61/228,373, filed Jul. 24, 2009; U.S. Provisional Serial No. 61/239,686, filed Sep. 3, 2009, and International Application No. PCT/US2010/022614, filed Jan. 29, 2010, which are hereby incorporated by reference.
MC3 comprising formulations are described, e.g., in U.S. Provisional Serial No. 61/244,834, filed Sep. 22, 2009, U.S. Provisional Serial No. 61/185,800, filed Jun. 10, 2009, and International Application No. PCT/US10/28224, filed Jun. 10, 2010, which are hereby incorporated by reference.
ALNY-100 comprising formulations are described, e.g., International patent application number PCT/US09/63933, filed on Nov. 10, 2009, which is hereby incorporated by reference.
C12-200 comprising formulations are described in U.S. Provisional Serial No. 61/175,770, filed May 5, 2009 and International Application No. PCT/US10/33777, filed May 5, 2010, which are hereby incorporated by reference.

[0420] DSPC: distearoylphosphatidylcholine
[0421] DPPC: dipalmitoylphosphatidylcholine
[0422] PEG-DMG: PEG-didimyristoyl glycerol (C14-PEG, or PEG-C14) (PEG with avg mol wt of 2000)
[0423] PEG-DSG: PEG-distyryl glycerol (C18-PEG, or PEG-C18) (PEG with avg mol wt of 2000)
[0424] PEG-cDMA: PEG-carbamoyl-1,2-dimyristyloxypropylamine (PEG with avg mol wt of 2000)

[0425] SNALP (1,2-Dilinolenyloxy-N,N-dimethylaminopropane (DLinDMA)) comprising formulations are described in International Publication No. WO2009/127060, filed Apr. 15, 2009, which is hereby incorporated by reference.

[0426] XTC comprising formulations are described, e.g., in U.S. Provisional Ser. No. 61/148,366, filed Jan. 29, 2009; U.S. Provisional Ser. No. 61/156,851, filed Mar. 2, 2009; U.S. Provisional Ser. No. 61/185,712, filed Jun. 10, 2009; U.S. Provisional Ser. No. 61/228,373, filed Jul. 24, 2009; U.S. Provisional Ser. No. 61/239,686, filed Sep. 3, 2009, and International Application No. PCT/US2010/022614, filed Jan. 29, 2010, which are hereby incorporated by reference.

[0427] MC3 comprising formulations are described, e.g., in U.S. Provisional Ser. No. 61/244,834, filed Sep. 22, 2009, U.S. Provisional Ser. No. 61/185,800, filed Jun. 10, 2009, and International Application No. PCT/US10/28224, filed Jun. 10, 2010, which are hereby incorporated by reference.

[0428] ALNY-100 comprising formulations are described, e.g., International patent application number PCT/US09/63933, filed on Nov. 10, 2009, which is hereby incorporated by reference.

[0429] C12-200 comprising formulations are described in U.S. Provisional Ser. No. 61/175,770, filed May 5, 2009 and International Application No. PCT/US10/33777, filed May 5, 2010, which are hereby incorporated by reference.

### Synthesis of Cationic Lipids

[0430] Any of the compounds, e.g., cationic lipids and the like, used in the nucleic acid-lipid particles featured in the invention may be prepared by known organic synthesis techniques. All substituents are as defined below unless indicated otherwise.

[0431] “Alkyl” means a straight chain or branched, noncyclic or cyclic, saturated aliphatic hydrocarbon containing from 1 to 24 carbon atoms. Representative saturated straight chain alkyls include methyl, ethyl, n-propyl, n-butyl, n-pentyl, n-hexyl, and the like; while saturated branched alkyls include isopropyl, sec-butyl, isobutyl, tert-butyl, isopentyl, and the like. Representative saturated cyclic alkyls include cyclopropyl, cyclobutyl, cyclopentyl, cyclohexyl, and the like; while unsaturated cyclic alkyls include cyclopentenyl and cyclohexenyl, and the like.

[0432] “Alkenyl” means an alkyl, as defined above, containing at least one double bond between adjacent carbon atoms. Alkenyls include both cis and trans isomers. Representative straight chain and branched alkenyls include ethylenyl, propylenyl, 1-butenyl, 2-butenyl, isobutylenyl, 1-pentenyl, 2-pentenyl, 3-methyl-1-butenyl, 2-methyl-2-butenyl, 2,3-dimethyl-2-butenyl, and the like.

[0433] “Alkynyl” means any alkyl or alkenyl, as defined above, which additionally contains at least one triple bond between adjacent carbons. Representative straight chain and branched alkynyls include acetylenyl, propynyl, 1-butynyl, 2-butynyl, 1-pentynyl, 2-pentynyl, 3-methyl-1 butynyl, and the like.

[0434] “Acyl” means any alkyl, alkenyl, or alkynyl wherein the carbon at the point of attachment is substituted with an oxo group, as defined below. For example, —C(═O)alkyl, —C(═O)alkenyl, and —C(═O)alkynyl are acyl groups.

[0435] “Heterocycle” means a 5- to 7-membered monocyclic, or 7- to 10-membered bicyclic, heterocyclic ring which is either saturated, unsaturated, or aromatic, and which contains from 1 or 2 heteroatoms independently selected from nitrogen, oxygen and sulfur, and wherein the nitrogen and sulfur heteroatoms may be optionally oxidized, and the nitrogen heteroatom may be optionally quaternized, including bicyclic rings in which any of the above heterocycles are fused to a benzene ring. The heterocycle may be attached via any heteroatom or carbon atom. Heterocycles include heteroaryls as defined below. Heterocycles include morpholinyl, pyrrolidinonyl, pyrrolidinyl, piperidinyl, piperizynyl, hydantoinyl, valerolactamyl, oxiranyl, oxetanyl, tetrahydrofuranyl, tetrahydropyranyl, tetrahydropyridinyl, tetrahydroprimidinyl, tetrahydrothiophenyl, tetrahydrothiopyranyl, tetrahydropyrimidinyl, tetrahydrothiophenyl, tetrahydrothiopyranyl, and the like.

[0436] The terms “optionally substituted alkyl”, “optionally substituted alkenyl”, “optionally substituted alkynyl”, “optionally substituted acyl”, and “optionally substituted heterocycle” means that, when substituted, at least one hydrogen atom is replaced with a substituent. In the case of an oxo substituent (═O) two hydrogen atoms are replaced. In this regard, substituents include oxo, halogen, heterocycle, —CN, —OR^{x}, —NR^{x}R^{y}, —NR^{x}C(═O)R^{y}, —NR^{x}SO₂R^{y}, —C(═O)R^{x}, —C(═O)OR^{x}, —C(═O)NR^{x}R^{y}, —SOₙR^{x} and —SOₙNR^{x}R^{y}, wherein n is 0, 1 or 2, R^{x} and R^{y} are the same or different and independently hydrogen, alkyl or heterocycle, and each of said alkyl and heterocycle substituents may be further substituted with one or more of oxo, halogen, —OH, —CN, alkyl, —OR^{x}, heterocycle, —NR^{x}R^{y}, —NR^{x}C(═O)R^{y}, —NR^{x}SO₂R^{y}, —C(═O)R^{x}, —C(═O)OR^{x}, —C(═O)NR^{x}R^{y}, —SOₙR^{x} and —SOₙNR^{x}R^{y}.

[0437] “Halogen” means fluoro, chloro, bromo and iodo.

[0438] In some embodiments, the methods featured in the invention may require the use of protecting groups. Protecting group methodology is well known to those skilled in the art (see, for example, PROTECTIVE GROUPS IN ORGANIC SYNTHESIS, Green, T. W. et al., Wiley-Interscience, New York City, 1999). Briefly, protecting groups within the context of this invention are any group that reduces or eliminates unwanted reactivity of a functional group. A protecting group can be added to a functional group to mask its reactivity during certain reactions and then removed to reveal the original functional group. In some embodiments an “alcohol protecting group” is used. An “alcohol protecting group” is any group which decreases or eliminates unwanted reactivity of an alcohol functional group. Protecting groups can be added and removed using techniques well known in the art.

### Synthesis of Formula A

[0439] In one embodiments, nucleic acid-lipid particles featured in the invention are formulated using a cationic lipid of formula A:

[chemical structure]

where R1 and R2 are independently alkyl, alkenyl or alkynyl, each can be optionally substituted, and R3 and R4 are independently lower alkyl or R3 and R4 can be taken together to form an optionally substituted heterocyclic ring. In some embodiments, the cationic lipid is XTC (2,2-Dilinoleyl-4-dimethylaminoethyl-[1,3]-dioxolane). In general, the lipid of formula A above may be made by the following Reaction Schemes 1 or 2, wherein all substituents are as defined above unless indicated otherwise.

[chemical structure]

[0440] Lipid A, where R₁ and R₂ are independently alkyl, alkenyl or alkynyl, each can be optionally substituted, and R₃ and R₄ are independently lower alkyl or R₃ and R₄ can be taken together to form an optionally substituted heterocyclic ring, can be prepared according to Scheme 1. Ketone 1 and bromide 2 can be purchased or prepared according to methods known to those of ordinary skill in the art. Reaction of 1 and 2 yields ketal 3. Treatment of ketal 3 with amine 4 yields lipids of formula A. The lipids of formula A can be converted to the corresponding ammonium salt with an organic salt of formula 5, where X is anion counter ion selected from halogen, hydroxide, phosphate, sulfate, or the like.

[chemical structure]

[0441] Alternatively, the ketone 1 starting material can be prepared according to Scheme 2. Grignard reagent 6 and cyanide 7 can be purchased or prepared according to methods known to those of ordinary skill in the art. Reaction of 6 and 7 yields ketone 1. Conversion of ketone 1 to the corresponding lipids of formula A is as described in Scheme 1.

### Synthesis of MC3

[0442] Preparation of DLin-M-C3-DMA (i.e., (6Z,9Z,28Z,31Z)-heptatriaconta-6,9,28,31-tetraen-19-yl 4-(dimethylamino)butanoate) was as follows. A solution of (6Z,9Z,28Z,31Z)-heptatriaconta-6,9,28,31-tetraen-19-ol (0.53 g), 4-N,N-dimethylaminobutyric acid hydrochloride (0.51 g), 4-N,N-dimethylaminopyridine (0.61 g) and 1-ethyl-3-(3-dimethylaminopropyl)carbodiimide hydrochloride (0.53 g) in dichloromethane (5 mL) was stirred at room temperature overnight. The solution was washed with dilute hydrochloric acid followed by dilute aqueous sodium bicarbonate. The organic fractions were dried over anhydrous magnesium sulphate, filtered and the solvent removed on a rotovap. The residue was passed down a silica gel column (20 g) using a 1-5% methanol/dichloromethane elution gradient. Fractions containing the purified product were combined and the solvent removed, yielding a colorless oil (0.54 g).

### Synthesis of ALNY-100

[0443] Synthesis of ketal 519 [ALNY-100] was performed using the following scheme 3:

[chemical structure]

### Synthesis of 515

[0444] To a stirred suspension of LiAlH4 (3.74 g, 0.09852 mol) in 200 ml anhydrous THF in a two neck RBF (1 L), was added a solution of 514 (10 g, 0.04926 mol) in 70 mL of THF slowly at 0° C. under nitrogen atmosphere. After complete addition, reaction mixture was warmed to room temperature and then heated to reflux for 4 h. Progress of the reaction was monitored by TLC. After completion of reaction (by TLC) the mixture was cooled to 0° C. and quenched with careful addition of saturated Na2SO4 solution. Reaction mixture was stirred for 4 h at room temperature and filtered off. Residue was washed well with THF. The filtrate and washings were mixed and diluted with 400 mL dioxane and 26 mL conc. HCl and stirred for 20 minutes at room temperature. The volatilities were stripped off under vacuum to furnish the hydrochloride salt of 515 as a white solid. Yield: 7.12 g 1H-NMR (DMSO, 400 MHz): δ=9.34 (broad, 2H), 5.68 (s, 2H), 3.74 (m, 1H), 2.66-2.60 (m, 2H), 2.50-2.45 (m, 5H).

### Synthesis of 516

[0445] To a stirred solution of compound 515 in 100 mL dry DCM in a 250 mL two neck RBF, was added NEt3 (37.2 mL, 0.2669 mol) and cooled to 0° C. under nitrogen atmosphere. After a slow addition of N-(benzyloxy-carbonyloxy)-succinimide (20 g, 0.08007 mol) in 50 mL dry DCM, reaction mixture was allowed to warm to room temperature. After completion of the reaction (2-3 h by TLC) mixture was washed successively with 1N HCl solution (1×100 mL) and saturated NaHCO₃ solution (1×50 mL). The organic layer was then dried over anhyd. Na2SO4 and the solvent was evaporated to give crude material which was purified by silica gel column chromatography to get 516 as sticky mass. Yield: 11 g (89%). 1H-NMR (CDCl3, 400 MHz): δ=7.36-7.27 (m, 5H), 5.69 (s, 2H), 5.12 (s, 2H), 4.96 (br., 1H) 2.74 (s, 3H), 2.60 (m, 2H), 2.30-2.25 (m, 2H). LC-MS [M+H]−232.3 (96.94%).

### Synthesis of 517A and 517B

[0446] The cyclopentene 516 (5 g, 0.02164 mol) was dissolved in a solution of 220 mL acetone and water (10:1) in a single neck 500 mL RBF and to it was added N-methyl morpholine-N-oxide (7.6 g, 0.06492 mol) followed by 4.2 mL of 7.6% solution of 0.0 (0.275 g, 0.00108 mol) in tert-butanol at room temperature. After completion of the reaction (˜3 h), the mixture was quenched with addition of solid Na2SO3 and resulting mixture was stirred for 1.5 h at room temperature. Reaction mixture was diluted with DCM (300 mL) and washed with water (2×100 mL) followed by saturated NaHCO₃ (1×50 mL) solution, water (1×30 mL) and finally with brine (1×50 mL). Organic phase was dried over an·Na2SO4 and solvent was removed in vacuum. Silica gel column chromatographic purification of the crude material was afforded a mixture of diastereomers, which were separated by prep HPLC. Yield: −6 g crude

[0447] 517A—Peak-1 (white solid), 5.13 g (96%). 1H-NMR (DMSO, 400 MHz): δ=7.39-7.31 (m, 5H), 5.04 (s, 2H), 4.78-4.73 (m, 1H), 4.48-4.47 (d, 2H), 3.94-3.93 (m, 2H), 2.71 (s, 3H), 1.72-1.67 (m, 4H). LC-MS—[M+H]−266.3, [M+NH4+]−283.5 present, HPLC-97.86%. Stereochemistry confirmed by X-ray.

### Synthesis of 518

[0448] Using a procedure analogous to that described for the synthesis of compound 505, compound 518 (1.2 g, 41%) was obtained as a colorless oil. 1H-NMR (CDCl3, 400 MHz): δ=7.35-7.33 (m, 4H), 7.30-7.27 (m, 1H), 5.37-5.27 (m, 8H), 5.12 (s, 2H), 4.75 (m, 1H), 4.58-4.57 (m, 2H), 2.78-2.74 (m, 7H), 2.06-2.00 (m, 8H), 1.96-1.91 (m, 2H), 1.62 (m, 4H), 1.48 (m, 2H), 1.37-1.25 (br m, 36H), 0.87 (m, 6H). HPLC-98.65%.

### General Procedure for the Synthesis of Compound 519

[0449] A solution of compound 518 (1 eq) in hexane (15 mL) was added in a drop-wise fashion to an ice-cold solution of LAH in THF (1 M, 2 eq). After complete addition, the mixture was heated at 40° C. over 0.5 h then cooled again on an ice bath. The mixture was carefully hydrolyzed with saturated aqueous Na2SO4 then filtered through celite and reduced to an oil. Column chromatography provided the pure 519 (1.3 g, 68%) which was obtained as a colorless oil. 13C NMR=130.2, 130.1 (×2), 127.9 (×3), 112.3, 79.3, 64.4, 44.7, 38.3, 35.4, 31.5, 29.9 (×2), 29.7, 29.6 (×2), 29.5 (×3), 29.3 (×2), 27.2 (×3), 25.6, 24.5, 23.3, 226, 14.1; Electrospray MS (+ve): Molecular weight for C44H80NO2 (M+H)+ Calc. 654.6, Found 654.6.

[0450] Formulations prepared by either the standard or extrusion-free method can be characterized in similar manners. For example, formulations are typically characterized by visual inspection. They should be whitish translucent solutions free from aggregates or sediment. Particle size and particle size distribution of lipid-nanoparticles can be measured by light scattering using, for example, a Malvern Zetasizer Nano ZS (Malvern, USA). Particles should be about 20-300 nm, such as 40-100 nm in size. The particle size distribution should be unimodal. The total dsRNA concentration in the formulation, as well as the entrapped fraction, is estimated using a dye exclusion assay. A sample of the formulated dsRNA can be incubated with an RNA-binding dye, such as Ribogreen (Molecular Probes) in the presence or absence of a formulation disrupting surfactant, e.g., 0.5% Triton-X100. The total dsRNA in the formulation can be determined by the signal from the sample containing the surfactant, relative to a standard curve. The entrapped fraction is determined by subtracting the “free” dsRNA content (as measured by the signal in the absence of surfactant) from the total dsRNA content. Percent entrapped dsRNA is typically >85%. For SNALP formulation, the particle size is at least 30 nm, at least 40 nm, at least 50 nm, at least 60 nm, at least 70 nm, at least 80 nm, at least 90 nm, at least 100 nm, at least 110 nm, and at least 120 nm. The suitable range is typically about at least 50 nm to about at least 110 nm, about at least 60 nm to about at least 100 nm, or about at least 80 nm to about at least 90 nm.

[0451] Compositions and formulations for oral administration include powders or granules, microparticulates, nanoparticulates, suspensions or solutions in water or non-aqueous media, capsules, gel capsules, sachets, tablets or minitablets. Thickeners, flavoring agents, diluents, emulsifiers, dispersing aids or binders may be desirable. In some embodiments, oral formulations are those in which dsRNAs featured in the invention are administered in conjunction with one or more penetration enhancers surfactants and chelators. Suitable surfactants include fatty acids and/or esters or salts thereof, bile acids and/or salts thereof. Suitable bile acids/salts include chenodeoxycholic acid (CDCA) and ursodeoxychenodeoxycholic acid (UDCA), cholic acid, dehydrocholic acid, deoxycholic acid, glucholic acid, glycholic acid, glycodeoxycholic acid, taurocholic acid, taurodeoxycholic acid, sodium tauro-24,25-dihydro-fusidate and sodium glycodihydrofusidate. Suitable fatty acids include arachidonic acid, undecanoic acid, oleic acid, lauric acid, caprylic acid, capric acid, myristic acid, palmitic acid, stearic acid, linoleic acid, linolenic acid, dicaprate, tricaprate, monoolein, dilaurin, glyceryl 1-monocaprate, 1-dodecylazacycloheptan-2-one, an acylcarnitine, an acylcholine, or a monoglyceride, a diglyceride or a pharmaceutically acceptable salt thereof (e.g., sodium). In some embodiments, combinations of penetration enhancers are used, for example, fatty acids/salts in combination with bile acids/salts. One exemplary combination is the sodium salt of lauric acid, capric acid and UDCA. Further penetration enhancers include polyoxyethylene-9-lauryl ether, polyoxyethylene-20-cetyl ether. DsRNAs featured in the invention may be delivered orally, in granular form including sprayed dried particles, or complexed to form micro or nanoparticles. DsRNA complexing agents include poly-amino acids; polyimines; polyacrylates; polyalkylacrylates, polyoxethanes, polyalkylcyanoacrylates; cationized gelatins, albumins, starches, acrylates, polyethyleneglycols (PEG) and starches; polyalkylcyanoacrylates; DEAE-derivatized polyimines, pollulans, celluloses and starches. Suitable complexing agents include chitosan, N-trimethylchitosan, poly-L-lysine, polyhistidine, polyornithine, polyspermines, protamine, polyvinylpyridine, polythiodiethylaminomethylethylene P(TDAE), polyaminostyrene (e.g., p-amino), poly(methylcyanoacrylate), poly(ethylcyanoacrylate), poly(butylcyanoacrylate), poly(isobutylcyanoacrylate), poly(isohexylcynaoacrylate), DEAE-methacrylate, DEAE-hexylacrylate, DEAE-acrylamide, DEAE-albumin and DEAE-dextran, polymethylacrylate, polyhexylacrylate, poly(D,L-lactic acid), poly(DL-lactic-co-glycolic acid (PLGA), alginate, and polyethyleneglycol (PEG). Oral formulations for dsRNAs and their preparation are described in detail in U.S. Pat. No. 6,887,906, US Publn. No. 20030027780, and U.S. Pat. No. 6,747,014, each of which is incorporated herein by reference.

[0452] Compositions and formulations for parenteral, intraparenchymal (into the brain), intrathecal, intraventricular or intrahepatic administration may include sterile aqueous solutions which may also contain buffers, diluents and other suitable additives such as, but not limited to, penetration enhancers, carrier compounds and other pharmaceutically acceptable carriers or excipients.

[0453] Pharmaceutical compositions of the present invention include, but are not limited to, solutions, emulsions, and liposome-containing formulations. These compositions may be generated from a variety of components that include, but are not limited to, preformed liquids, self-emulsifying solids and self-emulsifying semisolids.

[0454] The pharmaceutical formulations featured in the present invention, which may conveniently be presented in unit dosage form, may be prepared according to conventional techniques well known in the pharmaceutical industry. Such techniques include the step of bringing into association the active ingredients with the pharmaceutical carrier(s) or excipient(s). In general, the formulations are prepared by uniformly and intimately bringing into association the active ingredients with liquid carriers or finely divided solid carriers or both, and then, if necessary, shaping the product.

[0455] The compositions featured in the present invention may be formulated into any of many possible dosage forms such as, but not limited to, tablets, capsules, gel capsules, liquid syrups, soft gels, suppositories, and enemas. The compositions may also be formulated as suspensions in aqueous, non-aqueous or mixed media. Aqueous suspensions may further contain substances which increase the viscosity of the suspension including, for example, sodium carboxymethylcellulose, sorbitol and/or dextran. The suspension may also contain stabilizers.

### Additional Formulations

### Emulsions

[0456] The compositions of the present invention may be prepared and formulated as emulsions. Emulsions are typically heterogeneous systems of one liquid dispersed in another in the form of droplets usually exceeding 0.1□m in diameter (see e.g., Ansel's Pharmaceutical Dosage Forms and Drug Delivery Systems, Allen, L V., Popovich N G., and Ansel H C., 2004, Lippincott Williams & Wilkins (8th ed.), New York, NY; Idson, in Pharmaceutical Dosage Forms, Lieberman, Rieger and Banker (Eds.), 1988, Marcel Dekker, Inc., New York, N.Y., volume 1, p. 199; Rosoff, in Pharmaceutical Dosage Forms, Lieberman, Rieger and Banker (Eds.), 1988, Marcel Dekker, Inc., New York, N.Y., Volume 1, p. 245; Block in Pharmaceutical Dosage Forms, Lieberman, Rieger and Banker (Eds.), 1988, Marcel Dekker, Inc., New York, N.Y., volume 2, p. 335; Higuchi et al., in Remington's Pharmaceutical Sciences, Mack Publishing Co., Easton, Pa., 1985, p. 301). Emulsions are often biphasic systems comprising two immiscible liquid phases intimately mixed and dispersed with each other. In general, emulsions may be of either the water-in-oil (w/o) or the oil-in-water (o/w) variety. When an aqueous phase is finely divided into and dispersed as minute droplets into a bulk oily phase, the resulting composition is called a water-in-oil (w/o) emulsion. Alternatively, when an oily phase is finely divided into and dispersed as minute droplets into a bulk aqueous phase, the resulting composition is called an oil-in-water (o/w) emulsion. Emulsions may contain additional components in addition to the dispersed phases, and the active drug which may be present as a solution in either the aqueous phase, oily phase or itself as a separate phase. Pharmaceutical excipients such as emulsifiers, stabilizers, dyes, and anti-oxidants may also be present in emulsions as needed. Pharmaceutical emulsions may also be multiple emulsions that are comprised of more than two phases such as, for example, in the case of oil-in-water-in-oil (o/w/o) and water-in-oil-in-water (w/o/w) emulsions. Such complex formulations often provide certain advantages that simple binary emulsions do not. Multiple emulsions in which individual oil droplets of an o/w emulsion enclose small water droplets constitute a w/o/w emulsion. Likewise a system of oil droplets enclosed in globules of water stabilized in an oily continuous phase provides an o/w/o emulsion.

[0457] Emulsions are characterized by little or no thermodynamic stability. Often, the dispersed or discontinuous phase of the emulsion is well dispersed into the external or continuous phase and maintained in this form through the means of emulsifiers or the viscosity of the formulation. Either of the phases of the emulsion may be a semisolid or a solid, as is the case of emulsion-style ointment bases and creams. Other means of stabilizing emulsions entail the use of emulsifiers that may be incorporated into either phase of the emulsion. Emulsifiers may broadly be classified into four categories: synthetic surfactants, naturally occurring emulsifiers, absorption bases, and finely dispersed solids (see e.g., Ansel's Pharmaceutical Dosage Forms and Drug Delivery Systems, Allen, L V., Popovich N G., and Ansel H C., 2004, Lippincott Williams & Wilkins (8th ed.), New York, NY; Idson, in Pharmaceutical Dosage Forms, Lieberman, Rieger and Banker (Eds.), 1988, Marcel Dekker, Inc., New York, N.Y., volume 1, p. 199).

[0458] Synthetic surfactants, also known as surface active agents, have found wide applicability in the formulation of emulsions and have been reviewed in the literature (see e.g., Ansel's Pharmaceutical Dosage Forms and Drug Delivery Systems, Allen, L V., Popovich N G., and Ansel H C., 2004, Lippincott Williams & Wilkins (8th ed.), New York, NY; Rieger, in Pharmaceutical Dosage Forms, Lieberman, Rieger and Banker (Eds.), 1988, Marcel Dekker, Inc., New York, N.Y., volume 1, p. 285; Idson, in Pharmaceutical Dosage Forms, Lieberman, Rieger and Banker (Eds.), Marcel Dekker, Inc., New York, N.Y., 1988, volume 1, p. 199). Surfactants are typically amphiphilic and comprise a hydrophilic and a hydrophobic portion. The ratio of the hydrophilic to the hydrophobic nature of the surfactant has been termed the hydrophile/lipophile balance (HLB) and is a valuable tool in categorizing and selecting surfactants in the preparation of formulations. Surfactants may be classified into different classes based on the nature of the hydrophilic group: nonionic, anionic, cationic and amphoteric (see e.g., Ansel's Pharmaceutical Dosage Forms and Drug Delivery Systems, Allen, L V., Popovich N G., and Ansel H C., 2004, Lippincott Williams & Wilkins (8th ed.), New York, NY Rieger, in Pharmaceutical Dosage Forms, Lieberman, Rieger and Banker (Eds.), 1988, Marcel Dekker, Inc., New York, N.Y., volume 1, p. 285).

[0459] Naturally occurring emulsifiers used in emulsion formulations include lanolin, beeswax, phosphatides, lecithin and acacia. Absorption bases possess hydrophilic properties such that they can soak up water to form w/o emulsions yet retain their semisolid consistencies, such as anhydrous lanolin and hydrophilic petrolatum. Finely divided solids have also been used as good emulsifiers especially in combination with surfactants and in viscous preparations. These include polar inorganic solids, such as heavy metal hydroxides, nonswelling clays such as bentonite, attapulgite, hectorite, kaolin, montmorillonite, colloidal aluminum silicate and colloidal magnesium aluminum silicate, pigments and nonpolar solids such as carbon or glyceryl tristearate.

[0460] A large variety of non-emulsifying materials are also included in emulsion formulations and contribute to the properties of emulsions. These include fats, oils, waxes, fatty acids, fatty alcohols, fatty esters, humectants, hydrophilic colloids, preservatives and antioxidants (Block, in Pharmaceutical Dosage Forms, Lieberman, Rieger and Banker (Eds.), 1988, Marcel Dekker, Inc., New York, N.Y., volume 1, p. 335; Idson, in Pharmaceutical Dosage Forms, Lieberman, Rieger and Banker (Eds.), 1988, Marcel Dekker, Inc., New York, N.Y., volume 1, p. 199).

[0461] Hydrophilic colloids or hydrocolloids include naturally occurring gums and synthetic polymers such as polysaccharides (for example, acacia, agar, alginic acid, carrageenan, guar gum, karaya gum, and tragacanth), cellulose derivatives (for example, carboxymethylcellulose and carboxypropylcellulose), and synthetic polymers (for example, carbomers, cellulose ethers, and carboxyvinyl polymers). These disperse or swell in water to form colloidal solutions that stabilize emulsions by forming strong interfacial films around the dispersed-phase droplets and by increasing the viscosity of the external phase.

[0462] Since emulsions often contain a number of ingredients such as carbohydrates, proteins, sterols and phosphatides that may readily support the growth of microbes, these formulations often incorporate preservatives. Commonly used preservatives included in emulsion formulations include methyl paraben, propyl paraben, quaternary ammonium salts, benzalkonium chloride, esters of p-hydroxybenzoic acid, and boric acid. Antioxidants are also commonly added to emulsion formulations to prevent deterioration of the formulation.

[0463] Antioxidants used may be free radical scavengers such as tocopherols, alkyl gallates, butylated hydroxyanisole, butylated hydroxytoluene, or reducing agents such as ascorbic acid and sodium metabisulfite, and antioxidant synergists such as citric acid, tartaric acid, and lecithin.

[0464] The application of emulsion formulations via dermatological, oral and parenteral routes and methods for their manufacture have been reviewed in the literature (see e.g., Ansel's Pharmaceutical Dosage Forms and Drug Delivery Systems, Allen, L V., Popovich N G., and Ansel H C., 2004, Lippincott Williams & Wilkins (8th ed.), New York, NY; Idson, in Pharmaceutical Dosage Forms, Lieberman, Rieger and Banker (Eds.), 1988, Marcel Dekker, Inc., New York, N.Y., volume 1, p. 199). Emulsion formulations for oral delivery have been very widely used because of ease of formulation, as well as efficacy from an absorption and bioavailability standpoint (see e.g., Ansel's Pharmaceutical Dosage Forms and Drug Delivery Systems, Allen, L V., Popovich N G., and Ansel H C., 2004, Lippincott Williams & Wilkins (8th ed.), New York, NY; Rosoff, in Pharmaceutical Dosage Forms, Lieberman, Rieger and Banker (Eds.), 1988, Marcel Dekker, Inc., New York, N.Y., volume 1, p. 245; Idson, in Pharmaceutical Dosage Forms, Lieberman, Rieger and Banker (Eds.), 1988, Marcel Dekker, Inc., New York, N.Y., volume 1, p. 199). Mineral-oil base laxatives, oil-soluble vitamins and high fat nutritive preparations are among the materials that have commonly been administered orally as o/w emulsions.

[0465] In one embodiment of the present invention, the compositions of iRNAs and nucleic acids are formulated as microemulsions. A microemulsion may be defined as a system of water, oil and amphiphile which is a single optically isotropic and thermodynamically stable liquid solution (see e.g., Ansel's Pharmaceutical Dosage Forms and Drug Delivery Systems, Allen, L V., Popovich N G., and Ansel H C., 2004, Lippincott Williams & Wilkins (8th ed.), New York, NY; Rosoff, in Pharmaceutical Dosage Forms, Lieberman, Rieger and Banker (Eds.), 1988, Marcel Dekker, Inc., New York, N.Y., volume 1, p. 245). Typically microemulsions are systems that are prepared by first dispersing an oil in an aqueous surfactant solution and then adding a sufficient amount of a fourth component, generally an intermediate chain-length alcohol to form a transparent system. Therefore, microemulsions have also been described as thermodynamically stable, isotropically clear dispersions of two immiscible liquids that are stabilized by interfacial films of surface-active molecules (Leung and Shah, in: Controlled Release of Drugs: Polymers and Aggregate Systems, Rosoff, M., Ed., 1989, VCH Publishers, New York, pages 185-215). Microemulsions commonly are prepared via a combination of three to five components that include oil, water, surfactant, cosurfactant and electrolyte. Whether the microemulsion is of the water-in-oil (w/o) or an oil-in-water (o/w) type is dependent on the properties of the oil and surfactant used and on the structure and geometric packing of the polar heads and hydrocarbon tails of the surfactant molecules (Schott, in Remington's Pharmaceutical Sciences, Mack Publishing Co., Easton, Pa., 1985, p. 271).

[0466] The phenomenological approach utilizing phase diagrams has been extensively studied and has yielded a comprehensive knowledge, to one skilled in the art, of how to formulate microemulsions (see e.g., Ansel's Pharmaceutical Dosage Forms and Drug Delivery Systems, Allen, L V., Popovich N G., and Ansel H C., 2004, Lippincott Williams & Wilkins (8th ed.), New York, NY; Rosoff, in Pharmaceutical Dosage Forms, Lieberman, Rieger and Banker (Eds.), 1988, Marcel Dekker, Inc., New York, N.Y., volume 1, p. 245; Block, in Pharmaceutical Dosage Forms, Lieberman, Rieger and Banker (Eds.), 1988, Marcel Dekker, Inc., New York, N.Y., volume 1, p. 335). Compared to conventional emulsions, microemulsions offer the advantage of solubilizing water-insoluble drugs in a formulation of thermodynamically stable droplets that are formed spontaneously.

[0467] Surfactants used in the preparation of microemulsions include, but are not limited to, ionic surfactants, non-ionic surfactants, Brij 96, polyoxyethylene oleyl ethers, polyglycerol fatty acid esters, tetraglycerol monolaurate (ML310), tetraglycerol monooleate (MO310), hexaglycerol monooleate (PO310), hexaglycerol pentaoleate (PO500), decaglycerol monocaprate (MCA750), decaglycerol monooleate (MO750), decaglycerol sequioleate (SO750), decaglycerol decaoleate (DAO750), alone or in combination with cosurfactants. The cosurfactant, usually a short-chain alcohol such as ethanol, 1-propanol, and 1-butanol, serves to increase the interfacial fluidity by penetrating into the surfactant film and consequently creating a disordered film because of the void space generated among surfactant molecules. Microemulsions may, however, be prepared without the use of cosurfactants and alcohol-free self-emulsifying microemulsion systems are known in the art. The aqueous phase may typically be, but is not limited to, water, an aqueous solution of the drug, glycerol, PEG300, PEG400, polyglycerols, propylene glycols, and derivatives of ethylene glycol. The oil phase may include, but is not limited to, materials such as Captex 300, Captex 355, Capmul MCM, fatty acid esters, medium chain (C8-C12) mono, di, and tri-glycerides, polyoxyethylated glyceryl fatty acid esters, fatty alcohols, polyglycolized glycerides, saturated polyglycolized C8-C10 glycerides, vegetable oils and silicone oil.

[0468] Microemulsions are particularly of interest from the standpoint of drug solubilization and the enhanced absorption of drugs. Lipid based microemulsions (both o/w and w/o) have been proposed to enhance the oral bioavailability of drugs, including peptides (see e.g., U.S. Pat. Nos. 6,191,105; 7,063,860; 7,070,802; 7,157,099; Constantinides et al., Pharmaceutical Research, 1994, 11, 1385-1390; Ritschel, Meth. Find. Exp. Clin. Pharmacol., 1993, 13, 205). Microemulsions afford advantages of improved drug solubilization, protection of drug from enzymatic hydrolysis, possible enhancement of drug absorption due to surfactant-induced alterations in membrane fluidity and permeability, ease of preparation, ease of oral administration over solid dosage forms, improved clinical potency, and decreased toxicity (see e.g., U.S. Pat. Nos. 6,191,105; 7,063,860; 7,070,802; 7,157,099; Constantinides et al., Pharmaceutical Research, 1994, 11, 1385; Ho et al., J. Pharm. Sci., 1996, 85, 138-143). Often microemulsions may form spontaneously when their components are brought together at ambient temperature. This may be particularly advantageous when formulating thermolabile drugs, peptides or iRNAs. Microemulsions have also been effective in the transdermal delivery of active components in both cosmetic and pharmaceutical applications. It is expected that the microemulsion compositions and formulations of the present invention will facilitate the increased systemic absorption of iRNAs and nucleic acids from the gastrointestinal tract, as well as improve the local cellular uptake of iRNAs and nucleic acids.

[0469] Microemulsions of the present invention may also contain additional components and additives such as sorbitan monostearate (Grill 3), Labrasol, and penetration enhancers to improve the properties of the formulation and to enhance the absorption of the iRNAs and nucleic acids of the present invention. Penetration enhancers used in the microemulsions of the present invention may be classified as belonging to one of five broad categories—surfactants, fatty acids, bile salts, chelating agents, and non-chelating non-surfactants (Lee et al., Critical Reviews in Therapeutic Drug Carrier Systems, 1991, p. 92). Each of these classes has been discussed above.

### Penetration Enhancers

[0470] In one embodiment, the present invention employs various penetration enhancers to effect the efficient delivery of nucleic acids, particularly iRNAs, to the skin of animals. Most drugs are present in solution in both ionized and nonionized forms. However, usually only lipid soluble or lipophilic drugs readily cross cell membranes. It has been discovered that even non-lipophilic drugs may cross cell membranes if the membrane to be crossed is treated with a penetration enhancer. In addition to aiding the diffusion of non-lipophilic drugs across cell membranes, penetration enhancers also enhance the permeability of lipophilic drugs.

[0471] Penetration enhancers may be classified as belonging to one of five broad categories, i.e., surfactants, fatty acids, bile salts, chelating agents, and non-chelating non-surfactants (see e.g., Malmsten, M. Surfactants and polymers in drug delivery, Informa Health Care, New York, NY, 2002; Lee et al., Critical Reviews in Therapeutic Drug Carrier Systems, 1991, p. 92). Each of the above mentioned classes of penetration enhancers are described below in greater detail.

[0472] Surfactants: In connection with the present invention, surfactants (or “surface-active agents”) are chemical entities which, when dissolved in an aqueous solution, reduce the surface tension of the solution or the interfacial tension between the aqueous solution and another liquid, with the result that absorption of iRNAs through the mucosa is enhanced. In addition to bile salts and fatty acids, these penetration enhancers include, for example, sodium lauryl sulfate, polyoxyethylene-9-lauryl ether and polyoxyethylene-20-cetyl ether) (see e.g., Malmsten, M. Surfactants and polymers in drug delivery, Informa Health Care, New York, NY, 2002; Lee et al., Critical Reviews in Therapeutic Drug Carrier Systems, 1991, p. 92); and perfluorochemical emulsions, such as FC-43. Takahashi et al., J. Pharm. Pharmacol., 1988, 40, 252).

[0473] Fatty acids: Various fatty acids and their derivatives which act as penetration enhancers include, for example, oleic acid, lauric acid, capric acid (n-decanoic acid), myristic acid, palmitic acid, stearic acid, linoleic acid, linolenic acid, dicaprate, tricaprate, monoolein (1-monooleoyl-rac-glycerol), dilaurin, caprylic acid, arachidonic acid, glycerol 1-monocaprate, 1-dodecylazacycloheptan-2-one, acylcarnitines, acylcholines, C₁₋₂₀ alkyl esters thereof (e.g., methyl, isopropyl and t-butyl), and mono- and di-glycerides thereof (i.e., oleate, laurate, caprate, myristate, palmitate, stearate, linoleate, etc.) (see e.g., Touitou, E., et al. Enhancement in Drug Delivery, CRC Press, Danvers, MA, 2006; Lee et al., Critical Reviews in Therapeutic Drug Carrier Systems, 1991, p. 92; Muranishi, Critical Reviews in Therapeutic Drug Carrier Systems, 1990, 7, 1-33; El Hariri et al., J. Pharm. Pharmacol., 1992, 44, 651-654).

[0474] Bile salts: The physiological role of bile includes the facilitation of dispersion and absorption of lipids and fat-soluble vitamins (see e.g., Malmsten, M. Surfactants and polymers in drug delivery, Informa Health Care, New York, NY, 2002; Brunton, Chapter 38 in: Goodman & Gilman's The Pharmacological Basis of Therapeutics, 9th Ed., Hardman et al. Eds., McGraw-Hill, New York, 1996, pp. 934-935). Various natural bile salts, and their synthetic derivatives, act as penetration enhancers. Thus the term “bile salts” includes any of the naturally occurring components of bile as well as any of their synthetic derivatives. Suitable bile salts include, for example, cholic acid (or its pharmaceutically acceptable sodium salt, sodium cholate), dehydrocholic acid (sodium dehydrocholate), deoxycholic acid (sodium deoxycholate), glucholic acid (sodium glucholate), glycholic acid (sodium glycocholate), glycodeoxycholic acid (sodium glycodeoxycholate), taurocholic acid (sodium taurocholate), taurodeoxycholic acid (sodium taurodeoxycholate), chenodeoxycholic acid (sodium chenodeoxycholate), ursodeoxycholic acid (UDCA), sodium tauro-24,25-dihydro-fusidate (STDHF), sodium glycodihydrofusidate and polyoxyethylene-9-lauryl ether (POE) (see e.g., Malmsten, M. Surfactants and polymers in drug delivery, Informa Health Care, New York, NY, 2002; Lee et al., Critical Reviews in Therapeutic Drug Carrier Systems, 1991, page 92; Swinyard, Chapter 39 In: Remington's Pharmaceutical Sciences, 18th Ed., Gennaro, ed., Mack Publishing Co., Easton, Pa., 1990, pages 782-783; Muranishi, Critical Reviews in Therapeutic Drug Carrier Systems, 1990, 7, 1-33; Yamamoto et al., J. Pharm. Exp. Ther., 1992, 263, 25; Yamashita et al., J. Pharm. Sci., 1990, 79, 579-583).

[0475] Chelating Agents: Chelating agents, as used in connection with the present invention, can be defined as compounds that remove metallic ions from solution by forming complexes therewith, with the result that absorption of iRNAs through the mucosa is enhanced. With regards to their use as penetration enhancers in the present invention, chelating agents have the added advantage of also serving as DNase inhibitors, as most characterized DNA nucleases require a divalent metal ion for catalysis and are thus inhibited by chelating agents (Jarrett, J. Chromatogr., 1993, 618, 315-339). Suitable chelating agents include but are not limited to disodium ethylenediaminetetraacetate (EDTA), citric acid, salicylates (e.g., sodium salicylate, 5-methoxysalicylate and homovanilate), N-acyl derivatives of collagen, laureth-9 and N-amino acyl derivatives of β-diketones (enamines)(see e.g., Katdare, A. et al., Excipient developmentfor pharmaceutical, biotechnology, and drug delivery, CRC Press, Danvers, MA, 2006; Lee et al., Critical Reviews in Therapeutic Drug Carrier Systems, 1991, page 92; Muranishi, Critical Reviews in Therapeutic Drug Carrier Systems, 1990, 7, 1-33; Buur et al., J. Control Rel., 1990, 14, 43-51).

[0476] Non-chelating non-surfactants: As used herein, non-chelating non-surfactant penetration enhancing compounds can be defined as compounds that demonstrate insignificant activity as chelating agents or as surfactants but that nonetheless enhance absorption of iRNAs through the alimentary mucosa (see e.g., Muranishi, Critical Reviews in Therapeutic Drug Carrier Systems, 1990, 7, 1-33). This class of penetration enhancers include, for example, unsaturated cyclic ureas, 1-alkyl- and 1-alkenylazacyclo-alkanone derivatives (Lee et al., Critical Reviews in Therapeutic Drug Carrier Systems, 1991, page 92); and non-steroidal anti-inflammatory agents such as diclofenac sodium, indomethacin and phenylbutazone (Yamashita et al., J. Pharm. Pharmacol., 1987, 39, 621-626).

[0477] Agents that enhance uptake of iRNAs at the cellular level may also be added to the pharmaceutical and other compositions of the present invention. For example, cationic lipids, such as lipofectin (Junichi et al, U.S. Pat. No. 5,705,188), cationic glycerol derivatives, and polycationic molecules, such as polylysine (Lollo et al., PCT Application WO 97/30731), are also known to enhance the cellular uptake of dsRNAs. Examples of commercially available transfection reagents include, for example Lipofectamine™ (Invitrogen; Carlsbad, CA), Lipofectamine 2000™ (Invitrogen; Carlsbad, CA), 293Fectin™ (Invitrogen; Carlsbad, CA), Cellfectin™ (Invitrogen; Carlsbad, CA), DMRIE-C™ (Invitrogen; Carlsbad, CA), FreeStyle™ MAX (Invitrogen; Carlsbad, CA), Lipofectamine™ 2000 CD (Invitrogen; Carlsbad, CA), Lipofectamine™ (Invitrogen; Carlsbad, CA), RNAiMAX (Invitrogen; Carlsbad, CA), Oligofectamine™ (Invitrogen; Carlsbad, CA), Optifect™ (Invitrogen; Carlsbad, CA), X-tremeGENE Q2 Transfection Reagent (Roche; Grenzacherstrasse, Switzerland), DOTAP Liposomal Transfection Reagent (Grenzacherstrasse, Switzerland), DOSPER Liposomal Transfection Reagent (Grenzacherstrasse, Switzerland), or Fugene (Grenzacherstrasse, Switzerland), Transfectam® Reagent (Promega; Madison, WI), TransFast™ Transfection Reagent (Promega; Madison, WI), Tfx™-20 Reagent (Promega; Madison, WI), Tfx™-50 Reagent (Promega; Madison, WI), DreamFect™ (OZ Biosciences; Marseille, France), EcoTransfect (OZ Biosciences; Marseille, France), TransPass^{a} D1 Transfection Reagent (New England Biolabs; Ipswich, MA, USA), LyoVec™/LipoGen™ (Invivogen; San Diego, CA, USA), PerFectin Transfection Reagent (Genlantis; San Diego, CA, USA), NeuroPORTER Transfection Reagent (Genlantis; San Diego, CA, USA), GenePORTER Transfection reagent (Genlantis; San Diego, CA, USA), GenePORTER 2 Transfection reagent (Genlantis; San Diego, CA, USA), Cytofectin Transfection Reagent (Genlantis; San Diego, CA, USA), BaculoPORTER Transfection Reagent (Genlantis; San Diego, CA, USA), TroganPORTER™ transfection Reagent (Genlantis; San Diego, CA, USA), RiboFect (Bioline; Taunton, MA, USA), PlasFect (Bioline; Taunton, MA, USA), UniFECTOR (B-Bridge International; Mountain View, CA, USA), SureFECTOR (B-Bridge International; Mountain View, CA, USA), or HiFect™ (B-Bridge International, Mountain View, CA, USA), among others.

[0478] Other agents may be utilized to enhance the penetration of the administered nucleic acids, including glycols such as ethylene glycol and propylene glycol, pyrrols such as 2-pyrrol, azones, and terpenes such as limonene and menthone.

### Carriers

[0479] Certain compositions of the present invention also incorporate carrier compounds in the formulation. As used herein, “carrier compound” or “carrier” can refer to a nucleic acid, or analog thereof, which is inert (i.e., does not possess biological activity per se) but is recognized as a nucleic acid by in vivo processes that reduce the bioavailability of a nucleic acid having biological activity by, for example, degrading the biologically active nucleic acid or promoting its removal from circulation. The coadministration of a nucleic acid and a carrier compound, typically with an excess of the latter substance, can result in a substantial reduction of the amount of nucleic acid recovered in the liver, kidney or other extracirculatory reservoirs, presumably due to competition between the carrier compound and the nucleic acid for a common receptor. For example, the recovery of a partially phosphorothioate dsRNA in hepatic tissue can be reduced when it is coadministered with polyinosinic acid, dextran sulfate, polycytidic acid or 4-acetamido-4′isothiocyano-stilbene-2,2′-disulfonic acid (Miyao et al., DsRNA Res. Dev., 1995, 5, 115-121; Takakura et al., DsRNA & Nucl. Acid Drug Dev., 1996, 6, 177-183).

### Excipients

[0480] In contrast to a carrier compound, a “pharmaceutical carrier” or “excipient” is a pharmaceutically acceptable solvent, suspending agent or any other pharmacologically inert vehicle for delivering one or more nucleic acids to an animal. The excipient may be liquid or solid and is selected, with the planned manner of administration in mind, so as to provide for the desired bulk, consistency, etc., when combined with a nucleic acid and the other components of a given pharmaceutical composition. Typical pharmaceutical carriers include, but are not limited to, binding agents (e.g., pregelatinized maize starch, polyvinylpyrrolidone or hydroxypropyl methylcellulose, etc.); fillers (e.g., lactose and other sugars, microcrystalline cellulose, pectin, gelatin, calcium sulfate, ethyl cellulose, polyacrylates or calcium hydrogen phosphate, etc.); lubricants (e.g., magnesium stearate, talc, silica, colloidal silicon dioxide, stearic acid, metallic stearates, hydrogenated vegetable oils, corn starch, polyethylene glycols, sodium benzoate, sodium acetate, etc.); disintegrants (e.g., starch, sodium starch glycolate, etc.); and wetting agents (e.g., sodium lauryl sulphate, etc).

[0481] Pharmaceutically acceptable organic or inorganic excipients suitable for non-parenteral administration which do not deleteriously react with nucleic acids can also be used to formulate the compositions of the present invention. Suitable pharmaceutically acceptable carriers include, but are not limited to, water, salt solutions, alcohols, polyethylene glycols, gelatin, lactose, amylose, magnesium stearate, talc, silicic acid, viscous paraffin, hydroxymethylcellulose, polyvinylpyrrolidone and the like.

[0482] Formulations for topical administration of nucleic acids may include sterile and non-sterile aqueous solutions, non-aqueous solutions in common solvents such as alcohols, or solutions of the nucleic acids in liquid or solid oil bases. The solutions may also contain buffers, diluents and other suitable additives. Pharmaceutically acceptable organic or inorganic excipients suitable for non-parenteral administration which do not deleteriously react with nucleic acids can be used.

[0483] Suitable pharmaceutically acceptable excipients include, but are not limited to, water, salt solutions, alcohol, polyethylene glycols, gelatin, lactose, amylose, magnesium stearate, talc, silicic acid, viscous paraffin, hydroxymethylcellulose, polyvinylpyrrolidone and the like.

### Other Components

[0484] The compositions of the present invention may additionally contain other adjunct components conventionally found in pharmaceutical compositions, at their art-established usage levels. Thus, for example, the compositions may contain additional, compatible, pharmaceutically-active materials such as, for example, antipruritics, astringents, local anesthetics or anti-inflammatory agents, or may contain additional materials useful in physically formulating various dosage forms of the compositions of the present invention, such as dyes, flavoring agents, preservatives, antioxidants, opacifiers, thickening agents and stabilizers. However, such materials, when added, should not unduly interfere with the biological activities of the components of the compositions of the present invention. The formulations can be sterilized and, if desired, mixed with auxiliary agents, e.g., lubricants, preservatives, stabilizers, wetting agents, emulsifiers, salts for influencing osmotic pressure, buffers, colorings, flavorings and/or aromatic substances and the like which do not deleteriously interact with the nucleic acid(s) of the formulation.

[0485] Aqueous suspensions may contain substances that increase the viscosity of the suspension including, for example, sodium carboxymethylcellulose, sorbitol and/or dextran. The suspension may also contain stabilizers.

[0486] In some embodiments, pharmaceutical compositions featured in the invention include (a) one or more iRNA compounds and (b) one or more biologic agents which function by a non-RNAi mechanism. Examples of such biologic agents include agents that interfere with an interaction of LECT2 and at least one LECT2 binding partner.

[0487] Toxicity and therapeutic efficacy of such compounds can be determined by standard pharmaceutical procedures in cell cultures or experimental animals, e.g., for determining the LD50 (the dose lethal to 50% of the population) and the ED50 (the dose therapeutically effective in 50% of the population). The dose ratio between toxic and therapeutic effects is the therapeutic index and it can be expressed as the ratio LD50/ED50. Compounds that exhibit high therapeutic indices are typical.

[0488] The data obtained from cell culture assays and animal studies can be used in formulating a range of dosage for use in humans. The dosage of compositions featured in the invention lies generally within a range of circulating concentrations that include the ED50 with little or no toxicity. The dosage may vary within this range depending upon the dosage form employed and the route of administration utilized. For any compound used in the methods featured in the invention, the therapeutically effective dose can be estimated initially from cell culture assays. A dose may be formulated in animal models to achieve a circulating plasma concentration range of the compound or, when appropriate, of the polypeptide product of a target sequence (e.g., achieving a decreased concentration of the polypeptide) that includes the IC50 (i.e., the concentration of the test compound which achieves a half-maximal inhibition of symptoms) as determined in cell culture. Such information can be used to more accurately determine useful doses in humans. Levels in plasma may be measured, for example, by high performance liquid chromatography.

[0489] In addition to their administration, as discussed above, the iRNAs featured in the invention can be administered in combination with other known agents effective in treatment of diseases or disorders related to LECT2 expression. In any event, the administering physician can adjust the amount and timing of iRNA administration on the basis of results observed using standard measures of efficacy known in the art or described herein.

### Methods of Treating Disorders Related to Expression of a LECT2 Gene

[0490] The present disclosure relates to the use of an iRNA targeting LECT2 to inhibit LECT2 expression and/or to treat a disease, disorder, or pathological process that is related to LECT2 expression.

[0491] In one aspect, a method of treatment of a disorder related to expression of LECT2 is provided, the method comprising administering an iRNA (e.g., a dsRNA) disclosed herein to a subject in need thereof. In some embodiments, the iRNA inhibits (decreases) LECT2 expression. In some embodiments, the iRNA increases LECT2 expression.

[0492] As used herein, “a disorder related to LECT2 expression,” a “disease related to LECT2 expression, a “pathological process related to LECT2 expression,” or the like includes any condition, disorder, or disease in which LECT2 expression is altered (e.g., decreased or increased relative to a normal level). In some embodiments, LECT2 expression is decreased. In some embodiments, LECT2 expression is increased. In embodiments, the decrease or increase in LECT2 expression is detectable in the blood (e.g., in the plasma) of the subject. In embodiments, the decrease or increase in LECT2 expression is detectable in a tissue sample from the subject (e.g., in a kidney sample or a liver sample). The decrease or increase may be assessed relative the level observed in the same individual prior to the development of the disorder or relative to other individual(s) who do not have the disorder. The decrease or increase may be limited to a particular organ, tissue, or region of the body (e.g., the kidney or the liver).

[0493] As used herein, a “subject” to be treated according to the methods described herein, includes a human or non-human animal, e.g., a mammal. The mammal may be, for example, a rodent (e.g., a rat or mouse) or a primate (e.g., a monkey). In some embodiments, the subject is a human.

[0494] A “subject in need thereof” includes a subject having, suspected of having, or at risk of developing a disorder related to LECT2 expression. In some embodiments, the subject has, or is suspected of having, a disorder related to LECT2 expression. In some embodiments, the subject is at risk of developing a disorder related to LECT2 expression.

[0495] In some embodiments, the subject is an animal that serves as a model for a disorder related to LECT2 expression, e.g., a LECT2 amyloidosis.

### LECT2 Amyloidosis

[0496] In embodiments, the disorder related to LECT2 expression is an amyloidosis, e.g., a LECT2 amyloidosis. LECT2 amyloidosis has been described in several clinical studies. See, e.g., Benson, M. D. et al (2008) Kidney International, 74: 218-222; Murphy, C. L. et al. (2010) Am J Kidney Dis, 56(6):1100-1107; Larsen, C. P. et al. (2010) Kidney Int., 77(9):816-819; Holanda, D. G. et al. (20011) Nephrol. Dial. Transplant., 26 (1): 373-376; and Sethi, S. et al. (2012) Kidney International 82, 226-234 (hereinafter Sethi et al.).

[0497] Clinical and pathological features of LECT2 amyloidosis mimic those of amyloid light chain (AL) amyloidosis. These symptoms include, e.g., symptoms of kidney disease and renal failure, e.g., fluid retention, swelling, and shortness of breath. Amyloidosis may affect the heart, peripheral nervous system, gastrointestinal tract, blood, lungs and skin. Heart complications include, e.g., heart failure and irregular heart beat. Other symptoms include, e.g., stroke, gastrointestinal disorders, enlarged liver, diminished spleen function, diminished function of the adrenal and other endocrine glands, skin color change or growths, lung problems, bleeding and bruising problems, fatigue and weight loss. In embodiments, the methods described herein are associated with improvement in one or more symptoms described herein.

[0498] Methods for diagnosis of amyloidosis, e.g., LECT2 amyloidosis, are described, e.g., in Leung, N. et al. (2010) Blood, published online Sep. 4, 2012; DOI 10.1182/blood-2012-03-413682; Shiller, S. M. et al. (2011). Laboratory Methods for the Diagnosis of Hereditary Amyloidoses, Amyloidosis—Mechanisms and Prospects for Therapy, Dr. Svetlana Sarantseva (Ed.), ISBN: 978-953-307-253-1; Sethi et al. (see above) and in U.S. Patent Application Publication No. 20100323381.

[0499] Based on the results provided by Sethi et al., LECT2 amyloidosis accounts for a significant percentage of cases of renal amyloidosis. See Table 1 of Sethi et al., which shows that 26 out of 127 cases of renal amyloidosis studied by laser microdissection and mass spectrometry of renal biopsy and/or nephrectomy specimens were determined to be of the LECT2 amyloid type. Sethi et al. further report that apolipoprotein E protein and serum amyloid P component (SAP) were also present in all cases of LECT2 amyloidosis.

[0500] In embodiments, the amyloidosis, e.g., the LECT2 amyloidosis, involves systemic amyloid deposition. In embodiments, the amyloidosis, e.g., the LECT2 amyloidosis, is localized entirely or predominately to a particular tissue or organ (e.g., to the kidney or liver).

[0501] In embodiments, the amyloidosis, e.g., the LECT2 amyloidosis, is hereditary.

[0502] In embodiments, a LECT2 amyoidosis is diagnosed using analysis of a sample from the subject (e.g., a biopsy sample). In embodiments, the biopsy sample is a renal biopsy. In embodiments, the sample is a nephrectomy sample. In embodiments, the sample is from a liver biopsy or from other resected liver tissue. In embodiments, the sample is analyzed using methods selected from one or more of immunohistochemistry, LECT2 immunoassay, electron microscopy, laser microdissection, and mass spectrometry. In embodiments, the LECT2 amyloidosis is diagnosed using laser microdissection and mass spectrometry.

[0503] In embodiments, the amyloidosis, e.g., the LECT2 amyloidosis, affects the kidney, e.g., involves amyloid deposition in the kidney. In embodiments, kidney function is compromised as a result of the amyloidosis. In embodiments, the subject suffers from one or more of fluid retention, swelling, and shortness of breath. In embodiments, the subject has nephrotic syndrome. In embodiments, the subject suffers from proteinuria. In embodiments, the subject has renal failure.

[0504] In embodiments, the amyloidosis, e.g., the LECT2 amyloidosis, affects the liver, e.g., involves amyloid deposition in the liver. In embodiments, liver function is compromised as a result of the amyloidosis. In embodiments, the subject has hepatitis, e.g., chronic hepatitis. In embodiments, the hepatitis is a viral hepatitis.

[0505] LECT2 amyloidosis has been found to be particularly prevalent in Mexican Americans and has also been associated with homozygosity for the G allele of the LECT2 gene that encodes valine at position 40 in the mature protein (amino acid 58 in the unprocessed protein). See, e.g., Benson, M. D. et al. (2008) Kidney International, 74: 218-222; Murphy, C. L. et al. (2010) Am J Kidney Dis, 56(6):1100-1107.

[0506] In some embodiments, the subject is of Mexican descent. In some embodiments, the subject is a Mexican American.

[0507] In embodiments, the subject carries the G allele of the LECT2 gene that encodes valine at position 40 in the mature protein (amino acid 58 in the unprocessed protein). In embodiments, the subject is homozygous for the G allele (G/G genotype). In embodiments, a LECT2 protein expressed in the subject has valine at position 40 in the mature protein (or at amino acid 58 in the unprocessed protein).

[0508] In some embodiments, the method decreases LECT2 expression. In embodiments, the decrease in LECT2 expression is assessed relative to the level in the same individual prior to the treatment. In some embodiments, the method is shown to decrease LECT2 expression by comparing the levels of LECT2 expression in a treated subject (or group of subjects) with the levels in a control subject (or group of subjects), e.g., an untreated subject (or group of subjects) or a subject (or group of subjects) treated with a control treatment (e.g., an iRNA (e.g., a dsRNA) that does not target LECT2).

[0509] In embodiments, the method reduces amyloid deposition, e.g., deposition of amyloid comprising a LECT2 protein or a portion thereof. In embodiments, the protein is a wild type protein. In embodiments, the protein is a human LECT2 protein, or a portion thereof, that includes valine at position 40 (position 40 of the mature, secreted protein, or at amino acid 58 in the unprocessed protein, as described herein). In embodiments, the method decreases the size, number, and/or extent of amyloid deposits.

[0510] In embodiments, the method decreases one or more symptoms associated with amyloid deposition.

[0511] In some embodiments, the dsRNA is administered in a form that targets the dsRNA to a particular organ or tissue to inhibit amyloid deposition in the organ or tissue.

[0512] In some embodiments, the dsRNA is targeted to the liver. In some embodiments, the dsRNA is conjugated to a ligand, e.g., a GalNAc ligand (e.g., a GalNAc ligand as described herein) that targets the dsRNA to the liver (e.g., to hepatocytes).

[0513] Also provided herein is a method of reducing amyloid deposition, the method comprising administering a dsRNA as disclosed herein to a subject in need thereof (e.g., a subject having, suspected of having, or at risk for developing a LECT2 amyloidosis). In embodiments, the method decreases (e.g., prevents or diminishes) the size, number, and/or extent of amyloid deposits. The size, number, and/or extent of amyloid deposits may be assessed using any method known in the art (e.g., immunoassay, immunohistochemistry, mass spectrometry). The reduction of amyloid deposition may involve a decrease in amyloid deposition (e.g., size, number, and/or extent of amyloid deposits) of at least 5%, 10%, 15%, 20%, 25%, 30%, 35%, 40%, 45%, 50% or more.

[0514] In the methods provided herein, the iRNA (e.g., dsRNA) and compositions thereof are administered in a therapeutically effective amount. Therapeutic effects of administration of a LECT2 siRNA can be established, for example, by comparison with an appropriate control. For example, inhibition of amyloid deposition may be established, for example, in a group of patients with amyloidosis (e.g., LECT2 amyloidosis) by comparison of any appropriate parameter (e.g., a parameter assessing the size, number, or extent of amyloid deposition) with the same parameter in an appropriate control group. A control group (e.g., a group of similar individuals or the same group of individuals in a crossover design) may include, for example, an untreated population, a population that has been treated with a conventional treatment; a population that has been treated with placebo or a non-targeting iRNA; and the like.

### Rheumatoid Arthritis

[0515] Rheumatoid arthritis is also a disorder related to LECT2 expression. In particular, in a Japanese population, it was found that possession of one A allele of the LECT2 gene that encodes isoleucine at position 40 in the mature protein (or amino acid 58 in the unprocessed protein) was found to increase the overall risk of developing rheumatoid arthritis. Possessing two A alleles was strongly associated with disease severity. See Kameoka, Y. et al. (2000) Arth Rheum, 43(6):1419-20.

[0516] In one embodiment of the methods provided herein, the disorder related to LECT2 expression is rheumatoid arthritis. In one embodiment, the dsRNA inhibits LECT2 expression in a subject having rheumatoid arthritis. In some such embodiments, the dsRNA inhibits LECT2 expression in synovial tissue and/or in synovial fluid-derived cells (e.g., mononuclear cells and fibroblasts). In some embodiments, the dsRNA targets an mRNA that encodes isoleucine at position 40 in the mature protein (amino acid 58 in the unprocessed protein).

### Liver Injury

[0517] LECT2 expression can increase during acute liver injury.

[0518] In one embodiment of the methods provided herein, the disorder related to LECT2 expression is acute liver injury. In embodiments, the iRNA (e.g., dsRNA) modulates (e.g., increases or decreases) LECT2 expression. In embodiments, the iRNA modulates LECT2 expression in the liver. In embodiments, the iRNA decreases LECT2 expression in the liver. In embodiments, the iRNA increases LECT2 expression in the liver.

### Combination Therapies

[0519] In embodiments, an iRNA (e.g., a dsRNA) disclosed herein is administered in combination with a second therapy (e.g., one or more additional therapies) known to be effective in treating a disorder related to LECT2 expression (e.g., a LECT2 amyloidosis) or a symptom of such a disorder. The iRNA may be administered before, after, or concurrent with the second therapy. In embodiments, the iRNA is administered before the second therapy. In embodiments, the iRNA is administered after the second therapy. In embodiments, the iRNA is administered concurrent with the second therapy.

[0520] The second therapy may be an additional therapeutic agent. The iRNA and the additional therapeutic agent can be administered in combination in the same composition or the additional therapeutic agent can be administered as part of a separate composition.

[0521] In some embodiments, the second therapy is a non-iRNA therapeutic agent that is effective to treat the disorder or symptoms of the disorder.

[0522] In some embodiments, the disorder to be treated by the compositions or methods disclosed herein is a LECT2 amyloidosis that affects kidney function, e.g., through amyloid deposition in the kidney. In some such embodiments, the iRNA is administered in conjunction with a therapy that supports kidney function (e.g., dialysis, a diuretic, an angiotensin converting enzyme (ACE) inhibitor, an angiotensin receptor blocker (ARB), or dialysis).

[0523] In some embodiments, the disorder to be treated by the compositions or methods disclosed herein is a LECT2 amyloidosis involving amyloid deposits in the liver. In some such embodiments, the iRNA is administered in conjunction with a therapy that supports liver function.

[0524] In some embodiments, the disorder to be treated by the compositions or methods disclosed herein is a LECT2 amyloidosis, and the iRNA is administered in conjunction with removal of all or part of the organ(s) affected by the amyloidosis (e.g., resection of all or part of kidney or liver tissue affected by the amyloidosis). The removal is optionally conducted in conjunction with a replacement of all or part of the organ removed (e.g., in conjunction with a kidney or liver organ transplant).

### Administration Dosages, Routes, and Timing

[0525] A subject (e.g., a human subject, e.g., a patient) can be administered a therapeutic amount of iRNA. The therapeutic amount can be, e.g., 0.05-50 mg/kg. For example, the therapeutic amount can be 0.05, 0.1, 0.2, 0.3, 0.4, 0.5, 0.6, 0.7, 0.8, 0.9, 1.0, 1.5, 2.0, or 2.5, 3.0, 3.5, 4.0, 4.5, 5, 10, 15, 20, 25, 30, 35, 40, 45, or 50 mg/kg dsRNA.

[0526] In some embodiments, the iRNA is formulated for delivery to a target organ, e.g., to the liver.

[0527] In some embodiments, the iRNA is formulated as a lipid formulation, e.g., an LNP formulation as described herein. In some such embodiments, the therapeutic amount is 0.05-5 mg/kg, e.g., 0.05, 0.1, 0.2, 0.3, 0.4, 0.5, 0.6, 0.7, 0.8, 0.9, 1.0, 1.5, 2.0, 2.5, 3.0, 3.5, 4.0, 4.5, or 5.0 mg/kg dsRNA. In some embodiments, the lipid formulation, e.g., LNP formulation, is administered intravenously. In embodiments, the iRNA (e.g., dsRNA) is formulated as an LNP formulation and is administered (e.g., intravenously administered) at a dose of 0.1 to 0.5 mg/kg.

[0528] In some embodiments, the iRNA is administered by intravenous infusion over a period of time, such as over a 5 minute, 10 minute, 15 minute, 20 minute, or 25 minute period. In some embodiments, the iRNA is in the form of a GalNAc conjugate as described herein. In some such embodiments, the therapeutic amount is 0.5-50 mg, e.g., 0.5, 0.6, 0.7, 0.8, 0.9, 1.0, 1.5, 2.0, 2.5, 3.0, 3.5, 4.0, 4.5, 5.0, 6, 7, 8, 9, 10, 15, 20, 25, 30, 35, 40, 45, or 50 mg/kg dsRNA. In some embodiments, the GalNAc conjugate is administered subcutaneously. In embodiments, the iRNA (e.g., dsRNA) is in the form of a GalNAc conjugate and is administered (e.g., subcutaneously administered) at a dose of 1 to 10 mg/kg.

[0529] In some embodiments, the administration is repeated, for example, on a regular basis, such as, daily, biweekly (i.e., every two weeks) for one month, two months, three months, four months or longer. After an initial treatment regimen, the treatments can be administered on a less frequent basis. For example, after administration biweekly for three months, administration can be repeated once per month, for six months or a year or longer.

[0530] In some embodiments, the iRNA agent is administered in two or more doses. In some embodiments, the number or amount of subsequent doses is dependent on the achievement of a desired effect, e.g., inhibition of amyloid deposition, or the achievement of a therapeutic or prophylactic effect, e.g., reduction or prevention of one or more symptoms associated with the disorder.

[0531] In some embodiments, the iRNA agent is administered according to a schedule. For example, the iRNA agent may be administered once per week, twice per week, three times per week, four times per week, or five times per week. In some embodiments, the schedule involves regularly spaced administrations, e.g., hourly, every four hours, every six hours, every eight hours, every twelve hours, daily, every 2 days, every 3 days, every 4 days, every 5 days, weekly, biweekly, or monthly. In embodiments, the iRNA agent is administered at the frequency required to achieve a desired effect.

[0532] In embodiments, the schedule involves closely spaced administrations followed by a longer period of time during which the agent is not administered. For example, the schedule may involve an initial set of doses that are administered in a relatively short period of time (e.g., about every 6 hours, about every 12 hours, about every 24 hours, about every 48 hours, or about every 72 hours) followed by a longer time period (e.g., about 1 week, about 2 weeks, about 3 weeks, about 4 weeks, about 5 weeks, about 6 weeks, about 7 weeks, or about 8 weeks) during which the iRNA agent is not administered. In one embodiment, the iRNA agent is initially administered hourly and is later administered at a longer interval (e.g., daily, weekly, biweekly, or monthly). In another embodiment, the iRNA agent is initially administered daily and is later administered at a longer interval (e.g., weekly, biweekly, or monthly). In certain embodiments, the longer interval increases over time or is determined based on the achievement of a desired effect.

[0533] Before administration of a full dose of the iRNA, patients can be administered a smaller dose, such as a 5% infusion dose, and monitored for adverse effects, such as an allergic reaction, or for elevated lipid levels or blood pressure. In another example, the patient can be monitored for unwanted effects.

### Methods for Modulating Expression of a LECT2 Gene

[0534] In yet another aspect, the invention provides a method for modulating (e.g., inhibiting or activating) the expression of LECT2 gene, e.g., in a cell or in a subject. In some embodiments, the cell is ex vivo, in vitro, or in vivo. In some embodiments, the cell is in the liver (e.g., a hepatocyte). In some embodiments, the cell is in a subject (e.g., a mammal, such as, for example, a human). In some embodiments, the subject (e.g., the human) is at risk, or is diagnosed with a disorder related to expression of LECT2 expression, as described herein.

[0535] In one embodiment, the method includes contacting the cell with an iRNA as described herein, in an amount effective to decrease the expression of a LECT2 gene in the cell. “Contacting,” as used herein, includes directly contacting a cell, as well as indirectly contacting a cell. For example, a cell within a subject may be contacted when a composition comprising an iRNA is administered (e.g., intravenously or subcutaneously) to the subject.

[0536] The expression of a LECT2 gene may be assessed based on the level of expression of a LECT2 mRNA, a LECT2 protein, or the level of another parameter functionally linked to the level of expression of a LECT2 gene. In some embodiments, the expression of LECT2 is inhibited by at least 5%, at least 10%, at least 15%, at least 20%, at least 25%, at least 30%, at least 35%, at least 40%, at least 45%, at least 50%, at least 55%, at least 60%, at least 65%, at least 70%, at least 75%, at least 80%, at least 85%, at least 90%, or at least 95%. In some embodiments, the iRNA has an IC₅₀ in the range of 0.001-0.01 nM, 0.001-0.10 nM, 0.001-1.0 nM, 0.001-10 nM, 0.01-0.05 nM, 0.01-0.50 nM, 0.02-0.60 nM, 0.01-1.0 nM, 0.01-1.5 nM, 0.01-10 nM. The IC₅₀ value may be normalized relative to an appropriate control value, e.g., the IC₅₀ of a non-targeting iRNA.

[0537] In some embodiments, the method includes introducing into the cell an iRNA as described herein and maintaining the cell for a time sufficient to obtain degradation of the mRNA transcript of a LECT2 gene, thereby inhibiting the expression of the LECT2 gene in the cell.

[0538] In one embodiment, the method includes administering a composition described herein, e.g., a composition comprising an iRNA that targets LECT2, to the mammal such that expression of the target LECT2 gene is decreased, such as for an extended duration, e.g., at least two, three, four days or more, e.g., one week, two weeks, three weeks, or four weeks or longer. In some embodiments, the decrease in expression of LECT2 is detectable within 1 hour, 2 hours, 4 hours, 8 hours, 12 hours, or 24 hours of the first administration.

[0539] In another embodiment, the method includes administering a composition as described herein to a mammal such that expression of the target LECT2 gene is increased by e.g., at least 10% compared to an untreated animal. In some embodiments, the activation of LECT2 occurs over an extended duration, e.g., at least two, three, four days or more, e.g., one week, two weeks, three weeks, four weeks, or more. Without wishing to be bound by theory, an iRNA can activate LECT2 expression by stabilizing the LECT2 mRNA transcript, interacting with a promoter in the genome, and/or inhibiting an inhibitor of LECT2 expression.

[0540] The iRNAs useful for the methods and compositions featured in the invention specifically target RNAs (primary or processed) of a LECT2 gene. Compositions and methods for inhibiting the expression of a LECT2 gene using iRNAs can be prepared and performed as described elsewhere herein.

[0541] In one embodiment, the method includes administering a composition containing an iRNA, where the iRNA includes a nucleotide sequence that is complementary to at least a part of an RNA transcript of the LECT2 gene of the subject, e.g., the mammal, e.g., the human, to be treated. The composition may be administered by any appropriate means known in the art including, but not limited to oral, intraperitoneal, or parenteral routes, including intracranial (e.g., intraventricular, intraparenchymal and intrathecal), intravenous, intramuscular, subcutaneous, transdermal, airway (aerosol), nasal, rectal, and topical (including buccal and sublingual) administration.

[0542] In certain embodiments, the composition is administered by intravenous infusion or injection. In some such embodiments, the composition comprises a lipid formulated siRNA (e.g., an LNP formulation, such as an LNP11 formulation) for intravenous infusion.

[0543] In other embodiments, the composition is administered subcutaneously. In some such embodiments, the composition comprises an iRNA conjugated to a GalNAc ligand. In some such embodiments, the ligand targets the iRNA to the liver (e.g., to hepatocytes).

[0544] Unless otherwise defined, all technical and scientific terms used herein have the same meaning as commonly understood by one of ordinary skill in the art to which this invention belongs. Although methods and materials similar or equivalent to those described herein can be used in the practice or testing of the iRNAs and methods featured in the invention, suitable methods and materials are described below. All publications, patent applications, patents, and other references mentioned herein are incorporated by reference in their entirety. In case of conflict, the present specification, including definitions, will control. In addition, the materials, methods, and examples are illustrative only and not intended to be limiting.

### EXAMPLES

### Example 1. LECT2 siRNA

[0545] Nucleic acid sequences provided herein are represented using standard nomenclature. See the abbreviations of Table 1.

TABLE 1
Abbreviations of nucleotide monomers used in nucleic
acid sequence representation. It will be understood
that these monomers, when present in an oligonucleotide,
are mutually linked by 5′-3′-phosphodiester bonds.

| Abbreviation | Nucleotide(s) |
|---|---|
| A | Adenosine-3′-phosphate |
| Ab | beta-L-adenosine-3′-phosphate |
| Abs | beta-L-adenosine-3′-phosphorothioate |
| Af | 2′-fluoroadenosine-3′-phosphate |
| Afs | 2′-fluoroadenosine-3′-phosphorothioate |
| As | adenosine-3′-phosphorothioate |
| C | cytidine-3′-phosphate |
| Cb | beta-L-cytidine-3′-phosphate |
| Cbs | beta-L-cytidine-3′-phosphorothioate |
| Cf | 2′-fluorocytidine-3′-phosphate |
| Cfs | 2′-fluorocytidine-3′-phosphorothioate |
| (Chd) | 2′-O-hexadecyl-cytidine-3′-phosphate |
| (Chds) | 2′-O-hexadecyl-cytidine-3′-phosphorothioate |
| Cs | cytidine-3′-phosphorothioate |
| G | guanosine-3′-phosphate |
| Gb | beta-L-guanosine-3′-phosphate |
| Gbs | beta-L-guanosine-3′-phosphorothioate |
| Gf | 2′-fluoroguanosine-3′-phosphate |
| Gfs | 2′-fluoroguanosine-3′-phosphorothioate |
| Gs | guanosine-3′-phosphorothioate |
| T | 5′-methyluridine-3′-phosphate |
| Tb | beta-L-thymidine-3′-phosphate |
| Tbs | beta-L-thymidine-3′-phosphorothioate |
| Tf | 2′-fluoro-5-methyluridine-3′-phosphate |
| Tfs | 2′-fluoro-5-methyluridine-3′-phosphorothioate |
| Ts | 5-methyluridine-3′-phosphorothioate |
| U | Uridine-3′-phosphate |
| Ub | beta-L-uridine-3′-phosphate |
| Ubs | beta-L-uridine-3′-phosphorothioate |
| Uf | 2′-fluorouridine-3′-phosphate |
| Ufs | 2′-fluorouridine-3′-phosphorothioate |
| (Uhd) | 2′-O-hexadecyl-uridine-3′-phosphate |
| (Uhds) | 2′-O-hexadecyl-uridine-3′-phosphorothioate |
| Us | uridine-3′-phosphorothioate |
| N | any nucleotide (G, A, C, T or U) |
| a | 2′-O-methyladenosine-3′-phosphate |
| as | 2′-O-methyladenosine-3′-phosphorothioate |
| c | 2′-O-methylcytidine-3′-phosphate |
| cs | 2′-O-methylcytidine-3′-phosphorothioate |
| g | 2′-O-methylguanosine-3′-phosphate |
| gs | 2′-O-methylguanosine-3′-phosphorothioate |
| t | 2′-O-methyl-5-methyluridine-3′-phosphate |
| ts | 2′-O-methyl-5-methyluridine-3′-phosphorothioate |
| u | 2′-O-methyluridine-3′-phosphate |
| us | 2′-O-methyluridine-3′-phosphorothioate |
| dA | 2′-deoxyadenosine-3′-phosphate |
| dAs | 2′-deoxyadenosine-3′-phosphorothioate |
| dC | 2′-deoxycytidine-3′-phosphate |
| dCs | 2′-deoxycytidine-3′-phosphorothioate |
| dG | 2′-deoxyguanosine-3′-phosphate |
| dGs | 2′-deoxyguanosine-3′-phosphorothioate |
| dT | 2′-deoxythymidine |
| dTs | 2′-deoxythymidine-3′-phosphorothioate |
| dU | 2′-deoxyuridine |
| s | phosphorothioate linkage |
| L96¹ | N-[tris(GalNAc-alkyl)-amidodecanoyl)]-4-hydroxyprolinol |
| | Hyp-(GalNAc-alkyl)3 |
| (Aeo) | 2′-O-methoxyethyladenosine-3′-phosphate |
| (Aeos) | 2′-O-methoxyethyladenosine-3′-phosphorothioate |
| (Geo) | 2′-O-methoxyethylguanosine-3′-phosphate |
| (Geos) | 2′-O-methoxyethylguanosine-3′-phosphorothioate |
| (Teo) | 2′-O-methoxyethyl-5-methyluridine-3′-phosphate |
| (Teos) | 2′-O-methoxyethyl-5-methyluridine-3′-phosphorothioate |
| (m5Ceo) | 2′-O-methoxyethyl-5-methylcytidine-3′-phosphate |
| (m5Ceos) | 2′-O-methoxyethyl-5-methylcytidine-3′-phosphorothioate |

[chemical structure]

### Experimental Methods

### Bioinformatics

### Transcripts

[0546] A set of siRNAs targeting the human LECT2, “leukocyte cell derived chemotaxin 2” (human: NCBI refseqID NM_002302; NCBI GeneID: 3950), as well as toxicology-species LECT2 orthologs (cynomolgus monkey: XM_005557840; mouse: NM_010702; rat: NM_001108405) were designed using custom R and Python scripts. The human NM_002302REFSEQ mRNA, version 2, has a length of 1077 bases. The rationale and method for the set of siRNA designs is as follows: the predicted efficacy for every potential 19mer siRNA from position 10 through position 1077 was determined with a linear model derived the direct measure of mRNA knockdown from more than 20,000 distinct siRNA designs targeting a large number of vertebrate genes. Subsets of the LECT2 siRNAs were designed with perfect or near-perfect matches between human and cynomolgus monkey. A further subset was designed with perfect or near-perfect matches to human, cynomolgus monkey and mouse LECT2 orthologs. A further subset was designed with perfect or near-perfect matches to human, cynomolgus monkey, mouse and rat LECT2 orthologs. For each strand of the siRNA, a custom Python script was used in a brute force search to measure the number and positions of mismatches between the siRNA and all potential alignments in the target species transcriptome. Extra weight was given to mismatches in the seed region, defined here as positions 2-9 of the antisense oligonucleotide, as well the cleavage site of the siRNA, defined here as positions 10-11 of the antisense oligonucleotide. The relative weight of the mismatches was 2.8; 1.2: 1 for seed mismatches, cleavage site, and other positions up through antisense position 19. Mismatches in the first position were ignored. A specificity score was calculated for each strand by summing the value of each weighted mismatch. Preference was given to siRNAs whose antisense score in human was >=2.2 and predicted efficacy was >=50% knockdown of the LECT2 transcript. Pairs of exemplary oligos are evidenced in Table 2 and Table 3, modified and unmodified sequences respectively.

TABLE 2
LECT2-Modified sequences

| | | | Seq | | Seq | |
|---|---|---|---|---|---|---|
| | Seq | | ID | | ID | |
| | ID | | No: | | No: | mRNA |
| Duplex | No: | Sense | (anti | Antisense | mRNA | target |
| Name | (sense) | oligoSeq | sense) | oligoSeq | target | sequence |
| AD-75396 | 2 | UsusguguCfuCfAf | 3 | VpusUfsucuUfu | 4 | UUUUGUGUCUCA |
| | | CfacuaaagaaaL96 | | AfGfugugAfgAf | | CACUAAAGAAA |
| | | | | cacaasasa | | |
| AD-75385 | 5 | GsusgucuCfaCfAf | 6 | VpusAfsuuuCfu | 7 | UUGUGUCUCACA |
| | | CfuaaagaaauaL96 | | UfUfagugUfgAf | | CUAAAGAAAUG |
| | | | | gacacsasa | | |
| AD-75397 | 8 | AsasuucuAfaGfGf | 9 | VpusAfsgcuAfu | 10 | AGAAUUCUAAGG |
| | | CfuaaauagcuaL96 | | UfUfagccUfuAf | | CUAAAUAGCUA |
| | | | | gaauuscsu | | |
| AD-75386 | 11 | GsgsaaguAfuUfCf | 12 | VpusAfsaguUfu | 13 | UAGGAAGUAUUC |
| | | AfuucaaacuuaL96 | | GfAfaugaAfuAf | | AUUCAAACUUG |
| | | | | cuuccsusa | | |
| AD-75374 | 14 | UsuscauuCfaAfAf | 15 | VpusAfsauaUfu | 16 | UAUUCAUUCAAA |
| | | CfuugaauauuaL96 | | CfAfaguuUfgAf | | CUUGAAUAUUC |
| | | | | augaasusa | | |
| AD-75391 | 17 | UscsauucAfaAfCf | 18 | VpusGfsaauAfu | 19 | AUUCAUUCAAAC |
| | | UfugaauauucaL96 | | UfCfaaguUfuGf | | UUGAAUAUUCU |
| | | | | aaugasasu | | |
| AD-75393 | 20 | CsasuucaAfaCfUf | 21 | VpusAfsgaaUfa | 22 | UUCAUUCAAACU |
| | | UfgaauauucuaL96 | | UfUfcaagUfuUf | | UGAAUAUUCUU |
| | | | | gaaugsasa | | |
| AD-75381 | 23 | UscsaaacUfuGfAf | 24 | VpusUfsgaaGfa | 25 | AUUCAAACUUGA |
| | | AfuauucuucaaL96 | | AfUfauucAfaGf | | AUAUUCUUCAA |
| | | | | uuugasasu | | |
| AD-75383 | 26 | CsasaacuUfgAfAf | 27 | VpusUfsugaAfg | 28 | UUCAAACUUGAA |
| | | UfauucuucaaaL96 | | AfAfuauuCfaAf | | UAUUCUUCAAA |
| | | | | guuugsasa | | |
| AD-75372 | 29 | AsasacuuGfaAfUf | 30 | VpusUfsuugAfa | 31 | UCAAACUUGAAU |
| | | AfuucuucaaaaL96 | | GfAfauauUfcAf | | AUUCUUCAAAG |
| | | | | aguuusgsa | | |
| AD-75371 | 32 | CsusugaaUfaUfUf | 33 | VpusCfsucuUfu | 34 | AACUUGAAUAUU |
| | | CfuucaaagagaL96 | | GfAfagaaUfaUf | | CUUCAAAGAGA |
| | | | | ucaagsusu | | |
| AD-75365 | 35 | AscsucuaAfuCfAf | 36 | VpusUfsuucUfu | 37 | CAACUCUAAUCA |
| | | GfaggaagaaaaL96 | | CfCfucugAfuUf | | GAGGAAGAAAC |
| | | | | agagususg | | |
| AD-75384 | 38 | GsasaguaAfaAfCf | 39 | VpusAfsaaaCfa | 40 | AGGAAGUAAAAC |
| | | CfagauguuuuaL96 | | UfCfugguUfuUf | | CAGAUGUUUUC |
| | | | | acuucscsu | | |
| AD-75377 | 41 | GsusaaaaCfcAfGf | 42 | VpusUfsggaAfa | 43 | AAGUAAAACCAG |
| | | AfuguuuuccaaL96 | | AfCfaucuGfgUf | | AUGUUUUCCAC |
| | | | | uuuacsusu | | |
| AD-75380 | 44 | AsasaaccAfgAfUf | 45 | VpusGfsgugGfa | 46 | GUAAAACCAGAU |
| | | GfuuuuccaccaL96 | | AfAfacauCfuGf | | GUUUUCCACCA |
| | | | | guuuusasc | | |
| AD-75375 | 47 | AsasaccaGfaUfGf | 48 | VpusUfsgguGfg | 49 | UAAAACCAGAUG |
| | | UfuuuccaccaaL96 | | AfAfaacaUfcUf | | UUUUCCACCAA |
| | | | | gguuususa | | |
| AD-75376 | 50 | AsasccagAfuGfUf | 51 | VpusUfsuggUfg | 52 | AAAACCAGAUGU |
| | | UfuuccaccaaaL96 | | GfAfaaacAfuCf | | UUUCCACCAAA |
| | | | | ugguususu | | |
| AD-75400 | 53 | AscscagaUfgUfUf | 54 | VpusUfsuugGfu | 55 | AAACCAGAUGUU |
| | | UfuccaccaaaaL96 | | GfGfaaaaCfaUf | | UUCCACCAAAG |
| | | | | cuggususu | | |
| AD-75366 | 56 | AsusggcuGfuGfGf | 57 | VpusAfsgagUfa | 58 | CCAUGGCUGUGG |
| | | AfcaguacucuaL96 | | CfUfguccAfcAf | | ACAGUACUCUG |
| | | | | gccausgsg | | |
| AD-75379 | 59 | CsasggagAfaAfCf | 60 | VpusUfsuuuGfa | 61 | GCCAGGAGAAAC |
| | | CfuuaucaaaaaL96 | | UfAfagguUfuCf | | CUUAUCAAAAC |
| | | | | uccugsgsc | | |
| AD-75394 | 62 | GsgsagaaAfcCfUf | 63 | VpusUfsguuUfu | 64 | CAGGAGAAACCU |
| | | UfaucaaaacaaL96 | | GfAfuaagGfuUf | | UAUCAAAACAA |
| | | | | ucuccsusg | | |
| AD-75388 | 65 | UsusguguCfaAfAf | 66 | VpusUfsguaGfa | 67 | UUUUGUGUCAAA |
| | | AfuguucuacaaL96 | | AfCfauuuUfgAf | | AUGUUCUACAU |
| | | | | cacaasasa | | |
| AD-75390 | 68 | UsgsugucAfaAfAf | 69 | VpusAfsuguAfg | 70 | UUUGUGUCAAAA |
| | | UfguucuacauaL96 | | AfAfcauuUfuGf | | UGUUCUACAUU |
| | | | | acacasasa | | |
| AD-75378 | 71 | GsusgucaAfaAfUf | 72 | VpusAfsaugUfa | 73 | UUGUGUCAAAAU |
| | | GfuucuacauuaL96 | | GfAfacauUfuUf | | GUUCUACAUUA |
| | | | | gacacsasa | | |
| AD-75357 | 74 | UsgsucaaAfaUfGf | 75 | VpusUfsaauGfu | 76 | UGUGUCAAAAUG |
| | | UfucuacauuaaL96 | | AfGfaacaUfuUf | | UUCUACAUUAA |
| | | | | ugacascsa | | |
| AD-75354 | 77 | AsasuguuCfuAfCf | 78 | VpusUfsuggCfu | 79 | AAAAUGUUCUAC |
| | | AfuuaagccaaaL96 | | UfAfauguAfgAf | | AUUAAGCCAAU |
| | | | | acauususu | | |
| AD-75356 | 80 | AsusguucUfaCfAf | 81 | VpusAfsuugGfc | 82 | AAAUGUUCUACA |
| | | UfuaagccaauaL96 | | UfUfaaugUfaGf | | UUAAGCCAAUU |
| | | | | aacaususu | | |
| AD-75360 | 83 | UsuscuacAfuUfAf | 84 | VpusUfsuaaUfu | 85 | UGUUCUACAUUA |
| | | AfgccaauuaaaL96 | | GfGfcuuaAfuGf | | AGCCAAUUAAG |
| | | | | uagaascsa | | |
| AD-75362 | 86 | UscsuacaUfuAfAf | 87 | VpusCfsuuaAfu | 88 | GUUCUACAUUAA |
| | | GfccaauuaagaL96 | | UfGfgcuuAfaUf | | GCCAAUUAAGU |
| | | | | guagasasc | | |
| AD-75364 | 89 | CsusacauUfaAfGf | 90 | VpusAfscuuAfa | 91 | UUCUACAUUAAG |
| | | CfcaauuaaguaL96 | | UfUfggcuUfaAf | | CCAAUUAAGUA |
| | | | | uguagsasa | | |
| AD-75358 | 92 | UsascauuAfaGfCf | 93 | VpusUfsacuUfa | 94 | UCUACAUUAAGC |
| | | CfaauuaaguaaL96 | | AfUfuggcUfuAf | | CAAUUAAGUAU |
| | | | | auguasgsa | | |
| AD-75355 | 95 | CsasuuaaGfcCfAf | 96 | VpusUfsauaCfu | 97 | UACAUUAAGCCA |
| | | AfuuaaguauaaL96 | | UfAfauugGfcUf | | AUUAAGUAUAA |
| | | | | uaaugsusa | | |
| AD-75359 | 98 | AsusuaagCfcAfAf | 99 | VpusUfsuauAfc | 100 | ACAUUAAGCCAA |
| | | UfuaaguauaaaL96 | | UfUfaauuGfgCf | | UUAAGUAUAAA |
| | | | | uuaausgsu | | |
| AD-75367 | 101 | UsusaagcCfaAfUf | 102 | VpusUfsuuaUfa | 103 | CAUUAAGCCAAU |
| | | UfaaguauaaaaL96 | | CfUfuaauUfgGf | | UAAGUAUAAAG |
| | | | | cuuaasusg | | |
| AD-75369 | 104 | UsasagccAfaUfUf | 105 | VpusCfsuuuAfu | 106 | AUUAAGCCAAUU |
| | | AfaguauaaagaL96 | | AfCfuuaaUfuGf | | AAGUAUAAAGG |
| | | | | gcuuasasu | | |
| AD-75370 | 107 | AsasgccaAfuUfAf | 108 | VpusCfscuuUfa | 109 | UUAAGCCAAUUA |
| | | AfguauaaaggaL96 | | UfAfcuuaAfuUf | | AGUAUAAAGGU |
| | | | | ggcuusasa | | |
| AD-75368 | 110 | AsgsccaaUfuAfAf | 111 | VpusAfsccuUfu | 112 | UAAGCCAAUUAA |
| | | GfuauaaagguaL96 | | AfUfacuuAfaUf | | GUAUAAAGGUC |
| | | | | uggcususa | | |
| AD-75399 | 113 | AscsuuggAfaCfUf | 114 | VpusAfsgggCfa | 115 | AAACUUGGAACU |
| | | CfuauugcccuaL96 | | AfUfagagUfuCf | | CUAUUGCCCUU |
| | | | | caagususu | | |
| AD-75398 | 116 | UsusggaaCfuCfUf | 117 | VpusCfsaagGfg | 118 | ACUUGGAACUCU |
| | | AfuugcccuugaL96 | | CfAfauagAfgUf | | AUUGCCCUUGC |
| | | | | uccaasgsu | | |
| AD-75395 | 119 | GscsccuuGfcAfGf | 120 | VpusGfsauaAfa | 121 | UUGCCCUUGCAG |
| | | AfaaguuuaucaL96 | | CfUfuucuGfcAf | | AAAGUUUAUCC |
| | | | | agggcsasa | | |
| AD-75387 | 122 | UscsgcauGfuGfCf | 123 | VpusUfsuuuCfa | 124 | AAUCGCAUGUGC |
| | | AfcauugaaaaaL96 | | AfUfgugcAfcAf | | ACAUUGAAAAC |
| | | | | ugcgasusu | | |
| AD-75373 | 125 | GscsauguGfcAfCf | 126 | VpusAfsguuUfu | 127 | UCGCAUGUGCAC |
| | | AfuugaaaacuaL96 | | CfAfauguGfcAf | | AUUGAAAACUG |
| | | | | caugcsgsa | | |
| AD-75361 | 128 | CsasugugCfaCfAf | 129 | VpusCfsaguUfu | 130 | CGCAUGUGCACA |
| | | UfugaaaacugaL96 | | UfCfaaugUfgCf | | UUGAAAACUGU |
| | | | | acaugscsg | | |
| AD-75363 | 131 | AsusgugcAfcAfUf | 132 | VpusAfscagUfu | 133 | GCAUGUGCACAU |
| | | UfgaaaacuguaL96 | | UfUfcaauGfuGf | | UGAAAACUGUG |
| | | | | cacausgsc | | |
| AD-75382 | 134 | AsusggucAfgAfUf | 135 | VpusUfsauuUfu | 136 | CAAUGGUCAGAU |
| | | CfuucaaaauaaL96 | | GfAfagauCfuGf | | CUUCAAAAUAA |
| | | | | accaususg | | |
| AD-75389 | 137 | AsasauuuGfuGfUf | 138 | VpusUfsccuUfu | 139 | AGAAAUUUGUGU |
| | | UfcacaaaggaaL96 | | GfUfgaacAfcAf | | UCACAAAGGAA |
| | | | | aauuuscsu | | |
| AD-75392 | 140 | AsusuuguGfuUfCf | 141 | VpusUfsuucCfu | 142 | AAAUUUGUGUUC |
| | | AfcaaaggaaaaL96 | | UfUfgugaAfcAf | | ACAAAGGAAAA |
| | | | | caaaususu | | |
| AD-75396 | 236 | UsusguguCfuCfAf | 237 | UsUfsucuUfuAf | 4 | UUUUGUGUCUCA |
| | | Cfacuaaagaaa | | GfugugAfgAfca | | CACUAAAGAAA |
| | | | | caasasa | | |
| AD-75385 | 238 | GsusgucuCfaCfAf | 239 | UsAfsuuuCfuUf | 7 | UUGUGUCUCACA |
| | | Cfuaaagaaaua | | UfagugUfgAfga | | CUAAAGAAAUG |
| | | | | cacsasa | | |
| AD-75397 | 240 | AsasuucuAfaGfGf | 241 | UsAfsgcuAfuUf | 10 | AGAAUUCUAAGG |
| | | Cfuaaauagcua | | UfagccUfuAfga | | CUAAAUAGCUA |
| | | | | auuscsu | | |
| AD-75386 | 242 | GsgsaaguAfuUfCf | 243 | UsAfsaguUfuGf | 13 | UAGGAAGUAUUC |
| | | Afuucaaacuua | | AfaugaAfuAfcu | | AUUCAAACUUG |
| | | | | uccsusa | | |
| AD-75374 | 244 | UsuscauuCfaAfAf | 245 | UsAfsauaUfuCf | 16 | UAUUCAUUCAAA |
| | | Cfuugaauauua | | AfaguuUfgAfau | | CUUGAAUAUUC |
| | | | | gaasusa | | |
| AD-75391 | 246 | UscsauucAfaAfCf | 247 | UsGfsaauAfuUf | 19 | AUUCAUUCAAAC |
| | | Ufugaauauuca | | CfaaguUfuGfaa | | UUGAAUAUUCU |
| | | | | ugasasu | | |
| AD-75393 | 248 | CsasuucaAfaCfUf | 249 | UsAfsgaaUfaUf | 22 | UUCAUUCAAACU |
| | | Ufgaauauucua | | UfcaagUfuUfga | | UGAAUAUUCUU |
| | | | | augsasa | | |
| AD-75381 | 250 | UscsaaacUfuGfAf | 251 | UsUfsgaaGfaAf | 25 | AUUCAAACUUGA |
| | | Afuauucuucaa | | UfauucAfaGfuu | | AUAUUCUUCAA |
| | | | | ugasasu | | |
| AD-75383 | 252 | CsasaacuUfgAfAf | 253 | UsUfsugaAfgAf | 28 | UUCAAACUUGAA |
| | | Ufauucuucaaa | | AfuauuCfaAfgu | | UAUUCUUCAAA |
| | | | | uugsasa | | |
| AD-75372 | 254 | AsasacuuGfaAfUf | 255 | UsUfsuugAfaGf | 31 | UCAAACUUGAAU |
| | | Afuucuucaaaa | | AfauauUfcAfag | | AUUCUUCAAAG |
| | | | | uuusgsa | | |
| AD-75371 | 256 | CsusugaaUfaUfUf | 257 | UsCfsucuUfuGf | 34 | AACUUGAAUAUU |
| | | Cfuucaaagaga | | AfagaaUfaUfuc | | CUUCAAAGAGA |
| | | | | aagsusu | | |
| AD-75365 | 258 | AscsucuaAfuCfAf | 259 | UsUfsuucUfuCf | 37 | CAACUCUAAUCA |
| | | Gfaggaagaaaa | | CfucugAfuUfag | | GAGGAAGAAAC |
| | | | | agususg | | |
| AD-75384 | 260 | GsasaguaAfaAfCf | 261 | UsAfsaaaCfaUf | 40 | AGGAAGUAAAAC |
| | | Cfagauguuuua | | CfugguUfuUfac | | CAGAUGUUUUC |
| | | | | uucscsu | | |
| AD-75377 | 262 | GsusaaaaCfcAfGf | 263 | UsUfsggaAfaAf | 43 | AAGUAAAACCAG |
| | | Afuguuuuccaa | | CfaucuGfgUfuu | | AUGUUUUCCAC |
| | | | | uacsusu | | |
| AD-75380 | 264 | AsasaaccAfgAfUf | 265 | UsGfsgugGfaAf | 46 | GUAAAACCAGAU |
| | | Gfuuuuccacca | | AfacauCfuGfgu | | GUUUUCCACCA |
| | | | | uuusasc | | |
| AD-75375 | 266 | AsasaccaGfaUfGf | 267 | UsUfsgguGfgAf | 49 | UAAAACCAGAUG |
| | | Ufuuuccaccaa | | AfaacaUfcUfgg | | UUUUCCACCAA |
| | | | | uuususa | | |
| AD-75376 | 268 | AsasccagAfuGfUf | 269 | UsUfsuggUfgGf | 52 | AAAACCAGAUGU |
| | | Ufuuccaccaaa | | AfaaacAfuCfug | | UUUCCACCAAA |
| | | | | guususu | | |
| AD-75400 | 328 | AscscagaUfgUfUf | 329 | UsUfsuugGfuGf | 55 | AAACCAGAUGUU |
| | | Ufuccaccaaaa | | GfaaaaCfaUfcu | | UUCCACCAAAG |
| | | | | ggususu | | |
| AD-75366 | 330 | AsusggcuGfuGfGf | 331 | UsAfsgagUfaCf | 58 | CCAUGGCUGUGG |
| | | Afcaguacucua | | UfguccAfcAfgc | | ACAGUACUCUG |
| | | | | causgsg | | |
| AD-75379 | 332 | CsasggagAfaAfCf | 333 | UsUfsuuuGfaUf | 61 | GCCAGGAGAAAC |
| | | Cfuuaucaaaaa | | AfagguUfuCfuc | | CUUAUCAAAAC |
| | | | | cugsgsc | | |
| AD-75394 | 334 | GsgsagaaAfcCfUf | 335 | UsUfsguuUfuGf | 64 | CAGGAGAAACCU |
| | | Ufaucaaaacaa | | AfuaagGfuUfuc | | UAUCAAAACAA |
| | | | | uccsusg | | |
| AD-75388 | 270 | UsusguguCfaAfAf | 271 | UsUfsguaGfaAf | 67 | UUUUGUGUCAAA |
| | | Afuguucuacaa | | CfauuuUfgAfca | | AUGUUCUACAU |
| | | | | caasasa | | |
| AD-75390 | 272 | UsgsugucAfaAfAf | 273 | UsAfsuguAfgAf | 70 | UUUGUGUCAAAA |
| | | Ufguucuacaua | | AfcauuUfuGfac | | UGUUCUACAUU |
| | | | | Acasasa | | |
| AD-75378 | 274 | GsusgucaAfaAfUf | 275 | UsAfsaugUfaGf | 73 | UUGUGUCAAAAU |
| | | Gfuucuacauua | | AfacauUfuUfga | | GUUCUACAUUA |
| | | | | cacsasa | | |
| AD-75357 | 276 | UsgsucaaAfaUfGf | 278 | UsUfsaauGfuAf | 76 | UGUGUCAAAAUG |
| | | Ufucuacauuaa | | GfaacaUfuUfug | | UUCUACAUUAA |
| | | | | acascsa | | |
| AD-75354 | 279 | AsasuguuCfuAfCf | 280 | UsUfsuggCfuUf | 79 | AAAAUGUUCUAC |
| | | Afuuaagccaaa | | AfauguAfgAfac | | AUUAAGCCAAU |
| | | | | auususu | | |
| AD-75356 | 281 | AsusguucUfaCfAf | 282 | UsAfsuugGfcUf | 82 | AAAUGUUCUACA |
| | | Ufuaagccaaua | | UfaaugUfaGfaa | | UUAAGCCAAUU |
| | | | | caususu | | |
| AD-75360 | 283 | UsuscuacAfuUfAf | 284 | UsUfsuaaUfuGf | 85 | UGUUCUACAUUA |
| | | Afgccaauuaaa | | GfcuuaAfuGfua | | AGCCAAUUAAG |
| | | | | gaascsa | | |
| AD-75362 | 285 | UscsuacaUfuAfAf | 286 | UsCfsuuaAfuUf | 88 | GUUCUACAUUAA |
| | | Gfccaauuaaga | | GfgcuuAfaUfgu | | GCCAAUUAAGU |
| | | | | agasasc | | |
| AD-75364 | 287 | CsusacauUfaAfGf | 288 | UsAfscuuAfaUf | 91 | UUCUACAUUAAG |
| | | Cfcaauuaagua | | UfggcuUfaAfug | | CCAAUUAAGUA |
| | | | | uagsasa | | |
| AD-75358 | 289 | UsascauuAfaGfCf | 290 | UsUfsacuUfaAf | 94 | UCUACAUUAAGC |
| | | Cfaauuaaguaa | | UfuggcUfuAfau | | CAAUUAAGUAU |
| | | | | guasgsa | | |
| AD-75355 | 291 | CsasuuaaGfcCfAf | 292 | UsUfsauaCfuUf | 97 | UACAUUAAGCCA |
| | | Afuuaaguauaa | | AfauugGfcUfua | | AUUAAGUAUAA |
| | | | | augsusa | | |
| AD-75359 | 293 | AsusuaagCfcAfAf | 294 | UsUfsuauAfcUf | 100 | ACAUUAAGCCAA |
| | | Ufuaaguauaaa | | UfaauuGfgCfuu | | UUAAGUAUAAA |
| | | | | aausgsu | | |
| AD-75367 | 295 | UsusaagcCfaAfUf | 296 | UsUfsuuaUfaCf | 103 | CAUUAAGCCAAU |
| | | Ufaaguauaaaa | | UfuaauUfgGfcu | | UAAGUAUAAAG |
| | | | | uaasusg | | |
| AD-75369 | 297 | UsasagccAfaUfUf | 298 | UsCfsuuuAfuAf | 106 | AUUAAGCCAAUU |
| | | Afaguauaaaga | | CfuuaaUfuGfgc | | AAGUAUAAAGG |
| | | | | uuasasu | | |
| AD-75370 | 299 | AsasgccaAfuUfAf | 300 | UsCfscuuUfaUf | 109 | UUAAGCCAAUUA |
| | | Afguauaaagga | | AfcuuaAfuUfgg | | AGUAUAAAGGU |
| | | | | cuusasa | | |
| AD-75368 | 301 | AsgsccaaUfuAfAf | 302 | UsAfsccuUfuAf | 112 | UAAGCCAAUUAA |
| | | Gfuauaaaggua | | UfacuuAfaUfug | | GUAUAAAGGUC |
| | | | | gcususa | | |
| AD-75399 | 303 | AscsuuggAfaCfUf | 304 | UsAfsgggCfaAf | 115 | AAACUUGGAACU |
| | | Cfuauugcccua | | UfagagUfuCfca | | CUAUUGCCCUU |
| | | | | agususu | | |
| AD-75398 | 305 | UsusggaaCfuCfUf | 306 | UsCfsaagGfgCf | 118 | ACUUGGAACUCU |
| | | Afuugcccuuga | | AfauagAfgUfuc | | AUUGCCCUUGC |
| | | | | caasgsu | | |
| AD-75395 | 307 | GscsccuuGfcAfGf | 308 | UsGfsauaAfaCf | 121 | UUGCCCUUGCAG |
| | | Afaaguuuauca | | UfuucuGfcAfag | | AAAGUUUAUCC |
| | | | | ggcsasa | | |
| AD-75387 | 309 | UscsgcauGfuGfCf | 310 | UsUfsuuuCfaAf | 124 | AAUCGCAUGUGC |
| | | Afcauugaaaaa | | UfgugcAfcAfug | | ACAUUGAAAAC |
| | | | | cgasusu | | |
| AD-75373 | 311 | GscsauguGfcAfCf | 312 | UsAfsguuUfuCf | 127 | UCGCAUGUGCAC |
| | | Afuugaaaacua | | AfauguGfcAfca | | AUUGAAAACUG |
| | | | | ugcsgsa | | |
| AD-75361 | 313 | CsasugugCfaCfAf | 314 | UsCfsaguUfuUf | 130 | CGCAUGUGCACA |
| | | Ufugaaaacuga | | CfaaugUfgCfac | | UUGAAAACUGU |
| | | | | augscsg | | |
| AD-75363 | 315 | AsusgugcAfcAfUf | 316 | UsAfscagUfuUf | 133 | GCAUGUGCACAU |
| | | Ufgaaaacugua | | UfcaauGfuGfca | | UGAAAACUGUG |
| | | | | causgsc | | |
| AD-75382 | 317 | AsusggucAfgAfUf | 318 | UsUfsauuUfuGf | 136 | CAAUGGUCAGAU |
| | | Cfuucaaaauaa | | AfagauCfuGfac | | CUUCAAAAUAA |
| | | | | caususg | | |
| AD-75389 | 319 | AsasauuuGfuGfUf | 320 | UsUfsccuUfuGf | 139 | AGAAAUUUGUGU |
| | | Ufcacaaaggaa | | UfgaacAfcAfaa | | UCACAAAGGAA |
| | | | | uuuscsu | | |
| AD-75392 | 321 | AsusuuguGfuUfCf | 322 | UsUfsuucCfuUfU | 142 | AAAUUUGUGUUC |
| | | Afcaaaggaaaa | | FgugaAfcAfcaaa | | ACAAAGGAAAA |
| | | | | ususu | | |

TABLE 3
LECT2-Unmodified sequences

| | Seq | | Seq ID | | |
|---|---|---|---|---|---|
| | ID | | No: | | mRna |
| Duplex | No: | | (anti | | Target |
| Name | (sense) | transSeq | sense) | transSeq | Range |
| AD-75396 | 143 | UUGUGUCU | 144 | UUUCUUUAG | 58-80 |
| | | CACACUA | | UGUGAGACA | |
| | | AAGAAA | | CAAAA | |
| AD-75385 | 145 | GUGUCUCA | 146 | UAUUUCUUU | 60-82 |
| | | CACUAAA | | AGUGUGAGA | |
| | | GAAAUA | | CACAA | |
| AD-75397 | 147 | AAUUCUAA | 148 | UAGCUAUUU | 91-113 |
| | | GGCUAAA | | AGCCUUAGA | |
| | | UAGCUA | | AUUCU | |
| AD-75386 | 149 | GGAAGUAU | 150 | UAAGUUUGA | 112-134 |
| | | UCAUUCA | | AUGAAUACU | |
| | | AACUUA | | UCCUA | |
| AD-75374 | 151 | UUCAUUCA | 152 | UAAUAUUCA | 119-141 |
| | | AACUUGA | | AGUUUGAAU | |
| | | AUAUUA | | GAAUA | |
| AD-75391 | 153 | UCAUUCAA | 154 | AGAAUAUUC | 120-142 |
| | | ACUUGAA | | AAGUUUGAA | |
| | | UAUUCU | | UGAAU | |
| AD-75393 | 155 | CAUUCAAA | 156 | AAGAAUAUU | 121-143 |
| | | CUUGAAU | | CAAGUUUGA | |
| | | AUUCUU | | AUGAA | |
| AD-75381 | 157 | UCAAACUU | 158 | UUGAAGAAU | 124-146 |
| | | GAAUAUU | | AUUCAAGUU | |
| | | CUUCAA | | UGAAU | |
| AD-75383 | 159 | CAAACUUG | 160 | UUUGAAGAA | 125-147 |
| | | AAUAUUC | | UAUUCAAGU | |
| | | UUCAAA | | UUGAA | |
| AD-75372 | 161 | AAACUUGA | 162 | UUUUGAAGA | 126-148 |
| | | AUAUUCU | | AUAUUCAAG | |
| | | UCAAAA | | UUUGA | |
| AD-75371 | 163 | CUUGAAUA | 164 | UCUCUUUGA | 129-151 |
| | | UUCUUCA | | AGAAUAUUC | |
| | | AAGAGA | | AAGUU | |
| AD-75365 | 165 | ACUCUAAU | 166 | UUUUCUUCC | 161-183 |
| | | CAGAGGA | | UCUGAUUAG | |
| | | AGAAAA | | AGUUG | |
| AD-75384 | 167 | GAAGUAAA | 168 | UAAAACAUC | 187-209 |
| | | ACCAGAU | | UGGUUUUAC | |
| | | GUUUUA | | UUCCU | |
| AD-75377 | 169 | GUAAAACC | 170 | UUGGAAAAC | 190-212 |
| | | AGAUGUU | | AUCUGGUUU | |
| | | UUCCAA | | UACUU | |
| AD-75380 | 171 | AAAACCAG | 172 | UGGUGGAAA | 192-214 |
| | | AUGUUUU | | ACAUCUGGU | |
| | | CCACCA | | UUUAC | |
| AD-75375 | 173 | AAACCAGA | 174 | UUGGUGGAA | 193-215 |
| | | UGUUUUC | | AACAUCUGG | |
| | | CACCAA | | UUUUA | |
| AD-75376 | 175 | AACCAGAU | 176 | UUUGGUGGA | 194-216 |
| | | GUUUUCC | | AAACAUCUG | |
| | | ACCAAA | | GUUUU | |
| AD-75400 | 177 | ACCAGAUG | 178 | UUUUGGUGG | 195-217 |
| | | UUUUCCA | | AAAACAUCU | |
| | | CCAAAA | | GGUUU | |
| AD-75366 | 179 | AUGGCUGU | 180 | UAGAGUACU | 315-337 |
| | | GGACAGU | | GUCCACA | |
| | | ACUCUA | | GCCAUGG | |
| AD-75379 | 181 | CAGGAGAA | 182 | UUUUUGAUA | 428-450 |
| | | ACCUUAU | | AGGUUUCUC | |
| | | CAAAAA | | CUGGC | |
| AD-75394 | 183 | GGAGAAAC | 184 | UUGUUUUGA | 430-452 |
| | | CUUAUCA | | UAAGGUUUC | |
| | | AAACAA | | UCCUG | |
| AD-75388 | 185 | UUGUGUCA | 186 | AUGUAGAAC | 493-515 |
| | | AAAUGUU | | AUUUUGACA | |
| | | CUACAU | | CAAAA | |
| AD-75390 | 187 | UGUGUCAA | 188 | AAUGUAGAA | 494-516 |
| | | AAUGUUC | | CAUUUUGAC | |
| | | UACAUU | | ACAAA | |
| AD-75378 | 189 | GUGUCAAA | 190 | UAAUGUAGA | 495-517 |
| | | AUGUUCU | | ACAUUUUGA | |
| | | ACAUUA | | CACAA | |
| AD-75357 | 191 | UGUCAAAA | 192 | UUAAUGUAG | 496-518 |
| | | UGUUCUA | | AACAUUUUG | |
| | | CAUUAA | | ACACA | |
| AD-75354 | 193 | AAUGUUCU | 194 | AUUGGCUUA | 502-524 |
| | | ACAUUAA | | AUGUAGAAC | |
| | | GCCAAU | | AUUUU | |
| AD-75356 | 195 | AUGUUCUA | 196 | AAUUGGCUU | 503-525 |
| | | CAUUAAG | | AAUGUAGAA | |
| | | CCAAUU | | CAUUU | |
| AD-75360 | 197 | UUCUACAU | 198 | UUUAAUUGG | 506-528 |
| | | UAAGCCA | | CUUAAUGUA | |
| | | AUUAAA | | GAACA | |
| AD-75362 | 199 | UCUACAUU | 200 | ACUUAAUUG | 507-529 |
| | | AAGCCAA | | GCUUAAUGU | |
| | | UUAAGU | | AGAAC | |
| AD-75364 | 201 | CUACAUUA | 202 | UACUUAAUU | 508-530 |
| | | AGCCAAU | | GGCUUAAUG | |
| | | UAAGUA | | UAGAA | |
| AD-75358 | 203 | UACAUUAA | 204 | AUACUUAAU | 509-531 |
| | | GCCAAUU | | UGGCUUAAU | |
| | | AAGUAU | | GUAGA | |
| AD-75355 | 205 | CAUUAAGC | 206 | UUAUACUUA | 511-533 |
| | | CAAUUAA | | AUUGGCUUA | |
| | | GUAUAA | | AUGUA | |
| AD-75359 | 207 | AUUAAGCC | 208 | UUUAUACUU | 512-534 |
| | | AAUUAAG | | AAUUGGCUU | |
| | | UAUAAA | | AAUGU | |
| AD-75367 | 209 | UUAAGCCA | 210 | UUUUAUACU | 513-535 |
| | | AUUAAGU | | UAAUUGGCU | |
| | | AUAAAA | | UAAUG | |
| AD-75369 | 211 | UAAGCCAA | 212 | UCUUUAUAC | 514-536 |
| | | UUAAGUA | | UUAAUUGGC | |
| | | UAAAGA | | UUAAU | |
| AD-75370 | 213 | AAGCCAAU | 214 | ACCUUUAUA | 515-537 |
| | | UAAGUAU | | CUUAAUUGG | |
| | | AAAGGU | | CUUAA | |
| AD-75368 | 215 | AGCCAAUU | 216 | UACCUUUAU | 516-538 |
| | | AAGUAUA | | ACUUAAUUG | |
| | | AAGGUA | | GCUUA | |
| AD-75399 | 217 | ACUUGGAA | 218 | AAGGGCAAU | 556-578 |
| | | CUCUAUU | | AGAGUUCCA | |
| | | GCCCUU | | AGUUU | |
| AD-75398 | 219 | UUGGAACU | 220 | UCAAGGGCA | 558-580 |
| | | CUAUUGC | | AUAGAGUUC | |
| | | CCUUGA | | CAAGU | |
| AD-75395 | 221 | GCCCUUGC | 222 | UGAUAAACU | 571-593 |
| | | AGAAAGU | | UUCUGCAAG | |
| | | UUAUCA | | GGCAA | |
| AD-75387 | 223 | UCGCAUGU | 224 | UUUUUCAAU | 602-624 |
| | | GCACAUU | | GUGCACAUG | |
| | | GAAAAA | | CGAUU | |
| AD-75373 | 225 | GCAUGUGC | 226 | UAGUUUUCA | 604-626 |
| | | ACAUUGA | | AUGUGCACA | |
| | | AAACUA | | UGCGA | |
| AD-75361 | 227 | CAUGUGCA | 228 | ACAGUUUUC | 605-627 |
| | | CAUUGAA | | AAUGUGCAC | |
| | | AACUGU | | AUGCG | |
| AD-75363 | 229 | AUGUGCAC | 230 | UACAGUUUU | 606-628 |
| | | AUUGAAA | | CAAUGUGCA | |
| | | ACUGUA | | CAUGC | |
| AD-75382 | 231 | AUGGUCAG | 232 | UUAUUUUG | 667-689 |
| | | AUCUUCA | | AAGAUCUG | |
| | | AAAUAA | | ACCAUUG | |
| AD-75389 | 233 | AAAUUUGU | 234 | UUCCUUUG | 730-752 |
| | | GUUCACA | | UGAACACA | |
| | | AAGGAA | | AAUUUCU | |
| AD-75392 | 235 | AUUUGUGU | 327 | UUUUCCUU | 732-754 |
| | | UCACAAA | | UGUGAACA | |
| | | GGAAAA | | CAAAUUU | |

### Example 2. In Vitro Screening of LECT2 siRNA

### Experimental Methods

### Cell Culture and Transfections:

[0547] Cynomolgus monkey primary hepatocytes and mouse primary hepatocytes were transfected independently by adding 4.9 μl of Opti-MEM plus 0.1 μl of Lipofectamine RNAiMax per well (Invitrogen, Carlsbad CA. cat #13778-150) to 5 μl of siRNA duplexes per well into a 384-well plate and incubated at room temperature for 15 minutes. 40 μl of William's media containing 5×10³ primary mouse hepatocytes or primary cynomolgus monkey hepatocytes were then added to the siRNA mixture. Cells were incubated for 24 hours prior to RNA purification. Two dose experiments were performed at 10 nM and 0.1 nM final duplex concentrations.

### RNA Isolation:

[0548] Total RNA was isolated using an automated protocol on a BioTek-EL406 platform using DYNABEADs (Invitrogen, cat #61012). Briefly, 50 μl of Lysis/Binding Buffer and 25 μl of lysis buffer containing 3 μl of magnetic beads were added to the plate with cells. Plates were incubated on an electromagnetic shaker for 10 minutes at room temperature and then magnetic beads were captured and the supernatant was removed. Bead-bound RNA was then washed 2 times with 150 μl Wash Buffer A and once with Wash Buffer B. Beads were then washed with 150 μl Elution Buffer, re-captured and supernatant removed.

cDNA Synthesis:

[0549] cDNA was synthesized using ABI High capacity cDNA reverse transcription kit (Applied Biosystems, Foster City, CA, Cat #4368813). 10 μl of a master mix containing 1 μl 10× Buffer, 0.4 μl 25× dNTPs, 1 μl 10× Random primers, 0.5 μl Reverse Transcriptase, 0.5 l RNase inhibitor and 6.6 μl of H₂O per reaction was added to RNA isolated above. Plates were sealed, mixed, and incubated on an electromagnetic shaker for 10 minutes at room temperature, followed by 2 h 37° C.

### Real Time PCR:

[0550] 2 μl of cDNA were added to a master mix containing 0.5 μl of GAPDH TaqMan Probe (Hs99999905), 0.5 μl LECT2 probe and 5 μl Lightcycler 480 probe master mix (Roche Cat #04887301001) per well in a 384 well plates (Roche cat #04887301001). Mouse primary hepatocytes qPCR was probed with Mouse GAPDH TaqMan Probe (Mm03302249_g1) and Mouse LECT2 Taqman Probe (Mm00521920_ml). Cynomolgus monkey primary hepatocytes qPCR was probed with custom Cynomolgus GAPDH probe and Cynomolgus LECT2 probe (Mf02803673_ml). Real time PCR was done in a LightCycler480 Real Time PCR system (Roche) using the ΔΔCt(RQ) assay. Each duplex was tested in four independent transfections. To calculate relative fold change, real time data were analyzed using the AACt method and normalized to assays performed with cells transfected with 20 nM AD-1955, or mock transfected cells.

### Results

[0551] The results of single dose screen in primary monkey hepatocytes are shown in Table 4. The single dose experiments were performed at 10 nM and 0.1 nM final duplex concentration and the data are expressed as percent message remaining relative to AD-1955 non-targeting control.

TABLE 4
Cynomolgus monkey LECT2 endogenous
in vitro 10 nM and 0.1 nM screen

| Duplex Name | AVG_10 nM | AVG_0.1 nM |
|---|---|---|
| AD-75396 | 15.47 | 44.29 |
| AD-75385 | 17.03 | 31.17 |
| AD-75397 | 10.31 | 47.42 |
| AD-75386 | 6.75 | 23.04 |
| AD-75374 | 7.65 | 20.61 |
| AD-75391 | 7.93 | 23.75 |
| AD-75393 | 11.51 | 35.91 |
| AD-75381 | 6.31 | 25.34 |
| AD-75383 | 11.16 | 33.70 |
| AD-75372 | 6.04 | 29.32 |
| AD-75371 | 8.39 | 45.17 |
| AD-75365 | 20.79 | 36.92 |
| AD-75384 | 22.52 | 69.74 |
| AD-75377 | 16.34 | 55.19 |
| AD-75380 | 19.45 | 53.80 |
| AD-75375 | 19.25 | 60.03 |
| AD-75376 | 11.60 | 46.16 |
| AD-75400 | 12.85 | 51.18 |
| AD-75366 | 7.01 | 31.16 |
| AD-75379 | 8.45 | 22.32 |
| AD-75394 | 10.88 | 32.93 |
| AD-75388 | 11.73 | 29.19 |
| AD-75390 | 18.65 | 40.18 |
| AD-75378 | 11.86 | 22.91 |
| AD-75357 | 11.97 | 15.71 |
| AD-75354 | 12.23 | 18.92 |
| AD-75356 | 12.53 | 24.12 |
| AD-75360 | 19.08 | 29.89 |
| AD-75362 | 30.82 | 73.33 |
| AD-75364 | 16.05 | 27.52 |
| AD-75358 | 14.87 | 26.10 |
| AD-75355 | 15.07 | 25.39 |
| AD-75359 | 14.05 | 38.31 |
| AD-75367 | 21.75 | 41.54 |
| AD-75369 | 27.29 | 47.39 |
| AD-75370 | 37.54 | 90.36 |
| AD-75368 | 15.78 | 54.40 |
| AD-75399 | 16.04 | 49.48 |
| AD-75398 | 14.60 | 43.63 |
| AD-75395 | 14.41 | 42.82 |
| AD-75387 | 22.55 | 55.61 |
| AD-75373 | 31.91 | 63.76 |
| AD-75361 | 12.51 | 30.63 |
| AD-75363 | 41.36 | 74.88 |
| AD-75382 | 8.75 | 19.63 |
| AD-75389 | 70.65 | 89.12 |
| AD-75392 | 54.14 | 85.42 |

[0552] The results of single dose screen in primary murine hepatocytes are shown in Table 5. The single dose experiments were performed at 10 nM and 0.1 nM final duplex concentration and the data are expressed as percent message remaining relative to AD-1955 non-targeting control.

TABLE 5
Mouse LECT2 endogenous in vitro 10 nM and 0.1 nM screen

| Duplex Name | 10 nM_AVG | 0.1 nM_AVG_mouse |
|---|---|---|
| AD-75396 | 116.89 | 104.83 |
| AD-75385 | 92.20 | 89.51 |
| AD-75397 | 110.39 | 104.50 |
| AD-75386 | 100.18 | 95.89 |
| AD-75374 | 91.10 | 84.70 |
| AD-75391 | 104.66 | 96.55 |
| AD-75393 | 90.86 | 95.22 |
| AD-75381 | 85.25 | 88.23 |
| AD-75383 | 92.12 | 94.47 |
| AD-75372 | 88.04 | 94.84 |
| AD-75371 | 87.88 | 91.73 |
| AD-75365 | 88.21 | 90.64 |
| AD-75384 | 97.27 | 101.56 |
| AD-75377 | 85.21 | 85.01 |
| AD-75380 | 98.64 | 93.75 |
| AD-75375 | 91.78 | 92.58 |
| AD-75376 | 92.63 | 73.95 |
| AD-75400 | 117.41 | 116.65 |
| AD-75366 | 6.03 | 30.27 |
| AD-75379 | 63.13 | 71.73 |
| AD-75394 | 89.65 | 88.30 |
| AD-75388 | 27.12 | 78.75 |
| AD-75390 | 32.03 | 70.21 |
| AD-75378 | 32.41 | 75.13 |
| AD-75357 | 35.43 | 78.18 |
| AD-75354 | 12.91 | 42.26 |
| AD-75356 | 10.18 | 40.33 |
| AD-75360 | 24.41 | 47.51 |
| AD-75362 | 43.38 | 72.64 |
| AD-75364 | 13.02 | 47.30 |
| AD-75358 | 4.82 | 31.20 |
| AD-75355 | 5.97 | 33.68 |
| AD-75359 | 11.47 | 47.57 |
| AD-75367 | 8.17 | 39.39 |
| AD-75369 | 20.82 | 56.91 |
| AD-75370 | 39.52 | 77.19 |
| AD-75368 | 27.10 | 64.16 |
| AD-75399 | 102.64 | 93.97 |
| AD-75398 | 105.67 | 99.44 |
| AD-75395 | 96.54 | 91.07 |
| AD-75387 | 95.88 | 93.36 |
| AD-75373 | 87.42 | 93.42 |
| AD-75361 | 34.51 | 71.94 |
| AD-75363 | 85.75 | 71.92 |
| AD-75382 | 40.63 | 66.40 |
| AD-75389 | 85.63 | 83.01 |
| AD-75392 | 94.42 | 87.01 |

### EQUIVALENTS

[0553] Those skilled in the art will recognize, or be able to ascertain using no more than routine experimentation, many equivalents to the specific embodiments of the invention described herein. Such equivalents are intended to be encompassed by the following claims.

1. (canceled)

2. A double-stranded ribonucleic acid (dsRNA) for inhibiting expression of LECT2, wherein said dsRNA comprises a sense strand and an antisense strand, the antisense strand comprising a region of complementarity to a LECT2 RNA transcript, which antisense strand comprises at least 15 contiguous nucleotides differing by no more than 3 nucleotides from one of the antisense sequences listed in Tables 2 and 3.

3. The dsRNA of claim 4, wherein said dsRNA comprises at least one modified nucleotide.

4. The dsRNA of claim 2, wherein the duplex region is 15-30 nucleotide pairs in length, 17-23 nucleotide pairs in length, 19-21 nucleotide pairs in length, or 21-23 nucleotide pairs in length.

5.-7. (canceled)

8. The dsRNA of claim 2, wherein the region of complementarity
(a) is at least 17 nucleotides in length,
(b) is 19 nucleotides in length;
(c) is between 19 and 21 nucleotides in length; and/or
(d) consists of an antisense sequence selected from the antisense sequences disclosed in Tables 2 and 3.

9.-10. (canceled)

11. The dsRNA of claim 2, wherein
(a) at least one strand comprises a 3′ overhang of at least 1 nucleotide or a 3′ overhang of at least 2 nucleotides; and/or
(b) the dsRNA comprises a sense strand consisting of a sense sequence selected from the sense sequences disclosed in Tables 2 and 3, and an antisense strand consisting of an antisense sequence selected from the antisense sequences disclosed in Tables 2 and 3.

12. (canceled)

13. The dsRNA of claim 3, wherein
(a) at least one of said modified nucleotides is a 2′-O-methyl modified nucleotide, a nucleotide comprising a 5′-phosphorothioate group, and or a terminal nucleotide linked to a cholesteryl derivative or dodecanoic acid bisdecylamide group,
(b) at least one of said modified nucleotides is a 2′-deoxy-2′-fluoro modified nucleotide, a 2′-deoxy-modified nucleotide, a locked nucleic acid (LNA), an acyclic nucleotide, an abasic nucleotide, 2′-amino-modified nucleotide, 2′-alkyl-modified nucleotide, morpholino nucleotide, a phosphoramidate, or a non-natural base comprising nucleotide; or
(c) the modifications on the nucleotides are selected from the group consisting of locked nucleic acid (LNA), an acyclic nucleotide, hexitol or hexose nucleic acid (HNA), cyclohexene nucleic acid (CeNA), 2′-methoxyethyl, 2′-O-alkyl, 2′-O-allyl, 2′-C-allyl, 2′-fluoro, 2′-O-methyl, 2′-deoxy, 2′-hydroxyl, and combinations thereof.

14.-16. (canceled)

17. The dsRNA of claim 2, wherein the sense strand is conjugated to at least one ligand.

18. The dsRNA of claim 17, wherein
(a) the ligand is attached to the 3′ end of the sense strand;
(b) the ligand comprises a carbohydrate;
(c) the ligand is a GalNAc ligand;
(d) the ligand is [chemical structure]
(e) the ligand is attached via a linker;
(f) the ligand is attached via a bivalent or trivalent branched linker;
(g) the ligand and linker are as shown in Formula XXIV: [chemical structure]
(h) the ligand targets the dsRNA to hepatocytes.

19.-27. (canceled)

28. A cell containing the dsRNA of claim 2.

29. A pharmaceutical composition for inhibiting expression of a LECT2 gene, the composition comprising the dsRNA of claim 2.

30. The pharmaceutical composition of claim 29, wherein
(a) the dsRNA is in an unbuffered solution;
(b) the dsRNA is in an unbuffered solution, wherein the unbuffered solution is saline or water;
(c) the dsRNA is in a buffer solution;
(d) the dsRNA is in a buffer solution, wherein the buffer solution comprises acetate, citrate, prolamine, carbonate, phosphate or any combination thereof;
(e) the dsRNA is in a buffer solution, wherein the buffer solution is phosphate buffered saline (PBS);
(f) the pharmaceutical composition comprises a lipid formulation;
(g) the pharmaceutical composition comprises a lipid formulation, wherein the lipid formulation is a LNP formulation;
(h) the pharmaceutical composition comprises a lipid formulation, wherein the lipid formulation is a LNP11 formulation;
(i) the dsRNA is targeted to a liver cell or a hepatocyte;
(j) the pharmaceutical composition is suitable for administration intravenously or subcutaneously;
(k) the pharmaceutical composition comprises a lipid formulation and is suitable for administration intravenously; and/or
(l) the dsRNA is conjugated to a ligand chosen from a carbohydrate ligand or a GalNAc ligand.

31.-42. (canceled)

43. A composition for use in a method of inhibiting LECT2 expression in a cell, the method comprising:
(a) introducing into the cell the dsRNA of claim 2, and
(b) maintaining the cell of step (a) for a time sufficient to obtain degradation of the mRNA transcript of a LECT2 gene, thereby inhibiting expression of the LECT2 gene in the cell.

44. The composition for use of claim 43, wherein
(a) the cell is treated ex vivo, in vitro, or in vivo;
(b) the cell is a liver cell or a hepatocyte;
(c) the expression of LECT2 is inhibited by at least 20% or by at least 30%;
(d) the cell is present in a subject in need of treatment, prevention and/or management of a disorder related to LECT2 expression;
(e) the cell is present in a subject in need of treatment, prevention and/or management of a disorder related to LECT2 expression, wherein the disorder is amyloidosis; and/or
(f) the cell is present in a subject in need of treatment, prevention and/or management of a disorder related to LECT2 expression, wherein the disorder is a LECT2 amyloidosis.

45.-50. (canceled)

51. A composition for use in a method of treating a disorder related to LECT2 expression comprising administering to a subject in need of such treatment a therapeutically effective amount of
the dsRNA of claim 2.

52. (canceled)

53. The composition for use of claim 51, wherein
(a) the subject has amyloidosis or is at risk for developing amyloidosis;
(b) the subject has amyloidosis or is at risk for developing amyloidosis, wherein the amyloidosis is a LECT2 amyloidosis;
(c) the composition is administered according to a dosing regimen;
(d) the composition is administered according to a dosing regimen, wherein the dosing regimen is weekly, biweekly, or monthly; and/or
(e) the administering reduces LECT2 amyloid deposition.

54.-57. (canceled)

58. A composition for use in a method of reducing LECT2 amyloid deposition in a subject having a LECT2 amyloidosis, the method comprising administering to the subject
the dsRNA of claim 2.

59. The composition for use of claim 51, wherein
(a) the dsRNA is administered at a dose of 0.05-50 mg/kg;
(b) the dsRNA is administered at a concentration of 0.01 mg/kg to 5 mg/kg bodyweight of the subject;
(c) the dsRNA is formulated as an LNP formulation and is administered at a dose of 0.1 mg/kg to 0.5 mg/kg;
(d) the dsRNA is conjugated to a GalNAc ligand; and/or
(e) the dsRNA is conjugated to a GalNAc ligand and is administered at a dose of 1 mg/kg to 10 mg/kg.

60.-63. (canceled)

64. A vector encoding at least one strand of the dsRNA of claim 2.

65.-67. (canceled)

68. A cell comprising the vector of claim 64.

69. The composition for use of claim 58, wherein
(a) the dsRNA is administered at a dose of 0.05-50 mg/kg;
(b) the dsRNA is administered at a concentration of 0.01 mg/kg to 5 mg/kg bodyweight of the subject;
(c) the dsRNA is formulated as an LNP formulation and is administered at a dose of 0.1 mg/kg to 0.5 mg/kg;
(d) the dsRNA is conjugated to a GalNAc ligand; and/or
(e) the dsRNA is conjugated to a GalNAc ligand and is administered at a dose of 1 mg/kg to 10 mg/kg.

The application's sequence listing, which the Patent Office published only in electronic form, follows.

SEQUENCE LISTING (335 sequences)

SEQ ID NO: 1 - RNA, 1077 nt, Homo sapiens
  source 1..1077: mol_type = other RNA
aaatcaaatagctatccatggaatattagaacttgacttgctccatcctcttaaactttttgtgtctcacactaaagaaatgagagatgcagaattctaaggctaaatagctaggaagtattcattcaaacttgaatattcttcaaagagagtgtgggggcaactctaatcagaggaagaaactaaaggaagtaaaaccagatgttttccaccaaagccctccttttggctggtctgatttctaccgcactggcagggccatgggctaatatatgtgctggcaagtcttccaatgagatccggacgtgtgaccgccatggctgtggacagtactctgctcaaagaagtcagaggcctcaccagggtgtggacatcttgtgctctgctggatctactgtgtacgcaccattcactggaatgattgtgggccaggagaaaccttatcaaaacaagaatgctatcaataatggtgttcgaatatctggaagaggtttttgtgtcaaaatgttctacattaagccaattaagtataaaggtcctattaagaagggagaaaaacttggaactctattgcccttgcagaaagtttatcctggcatacaatcgcatgtgcacattgaaaactgtgactcgagtgaccctactgcatacctgtaaatcgaaggccaatggtcagatcttcaaaataaaaagtcatcttaaaaacctggatgcatacccttctcttcaagaaatttgtgttcacaaaggaaaaatgcatgaagggatggataccccattttccatgacatgattattacacattgcatgcctgtatcaaaacatctcacgtacctcataaacatatacacctatgtacccacaaaaattttttaattaaaaaaaggaaatttgagtttaaatagaaacatgataaatgcaagaaagaaaacattttgattttaactcattgtcactctgatgttcatgtgaactggttgcttcgggctctttgatctgtcacctatggaatctgagtggttttattttttagatttctcagtcccaaagatctaagataaataaacaagagaactt

SEQ ID NO: 2 - RNA, 21 nt, synthetic construct
  source 1..21: mol_type = other RNA
  modified_base 1: mod_base = OTHER; note = 2'-O-methyluridine-3'-phosphorothioate
  modified_base 2: mod_base = OTHER; note = 2'-O-methyluridine-3'-phosphorothioate
  modified_base 3: mod_base = OTHER; note = 2'-O-methylguanosine-3'-phosphate
  modified_base 4: mod_base = OTHER; note = 2'-O-methyluridine-3'-phosphate
  modified_base 5: mod_base = OTHER; note = 2'-O-methylguanosine-3'-phosphate
  modified_base 6: mod_base = OTHER; note = 2'-O-methyluridine-3'-phosphate
  modified_base 7: mod_base = OTHER; note = 2'-deoxy-2'-fluorocytidine-3'-phosphate
  modified_base 8: mod_base = OTHER; note = 2'-O-methyluridine-3'-phosphate
  modified_base 9: mod_base = OTHER; note = 2'-deoxy-2'-fluorocytidine-3'-phosphate
  modified_base 10: mod_base = OTHER; note = 2'-deoxy-2'-fluoroadenosine-3'-phosphate
  modified_base 11: mod_base = OTHER; note = 2'-deoxy-2'-fluorocytidine-3'-phosphate
  modified_base 12: mod_base = OTHER; note = 2'-O-methyladenosine-3'-phosphate
  modified_base 13: mod_base = OTHER; note = 2'-O-methylcytidine-3'-phosphate
  modified_base 14: mod_base = OTHER; note = 2'-O-methyluridine-3'-phosphate
  modified_base 15: mod_base = OTHER; note = 2'-O-methyladenosine-3'-phosphate
  modified_base 16: mod_base = OTHER; note = 2'-O-methyladenosine-3'-phosphate
  modified_base 17: mod_base = OTHER; note = 2'-O-methyladenosine-3'-phosphate
  modified_base 18: mod_base = OTHER; note = 2'-O-methylguanosine-3'-phosphate
  modified_base 19: mod_base = OTHER; note = 2'-O-methyladenosine-3'-phosphate
  modified_base 20: mod_base = OTHER; note = 2'-O-methyladenosine-3'-phosphate
  modified_base 21: mod_base = OTHER; note = 2'-O-methyladenosine-3'-phosphate ((2S,4R)-1-[29-[[2-(acetylamino)-2-deoxy-beta-D-galactopyra nosyl]oxy]-14,14-bis[[3-[[3-[[5-[[2-(acetylamino)-2-deoxy-b eta-D-galactopyranosyl]oxy]-1-oxopentyl]amino]propyl]amino] -3-oxopropoxy]methyl]-1,12,19,25-tetraoxo-16-oxa-13,20,24-t riazanonacos-1-yl]-4-hydroxy-2-pyrrolidinyl)methyl ester
ttgtgtctcacactaaagaaa

SEQ ID NO: 3 - RNA, 23 nt, synthetic construct
  source 1..23: mol_type = other RNA
  modified_base 1: mod_base = OTHER; note = 2'-O-methyluridine-3'-phosphorothioate 5'-(E)-Vinylphosphonate
  modified_base 2: mod_base = OTHER; note = 2'-deoxy-2'-fluorouridine-3'-phosphorothioate
  modified_base 3: mod_base = OTHER; note = 2'-O-methyluridine-3'-phosphate
  modified_base 4: mod_base = OTHER; note = 2'-O-methylcytidine-3'-phosphate
  modified_base 5: mod_base = OTHER; note = 2'-O-methyluridine-3'-phosphate
  modified_base 6: mod_base = OTHER; note = 2'-deoxy-2'-fluorouridine-3'-phosphate
  modified_base 7: mod_base = OTHER; note = 2'-O-methyluridine-3'-phosphate
  modified_base 8: mod_base = OTHER; note = 2'-deoxy-2'-fluoroadenosine-3'-phosphate
  modified_base 9: mod_base = OTHER; note = 2'-deoxy-2'-fluoroguanosine-3'-phosphate
  modified_base 10: mod_base = OTHER; note = 2'-O-methyluridine-3'-phosphate
  modified_base 11: mod_base = OTHER; note = 2'-O-methylguanosine-3'-phosphate
  modified_base 12: mod_base = OTHER; note = 2'-O-methyluridine-3'-phosphate
  modified_base 13: mod_base = OTHER; note = 2'-O-methylguanosine-3'-phosphate
  modified_base 14: mod_base = OTHER; note = 2'-deoxy-2'-fluoroadenosine-3'-phosphate
  modified_base 15: mod_base = OTHER; note = 2'-O-methylguanosine-3'-phosphate
  modified_base 16: mod_base = OTHER; note = 2'-deoxy-2'-fluoroadenosine-3'-phosphate
  modified_base 17: mod_base = OTHER; note = 2'-O-methylcytidine-3'-phosphate
  modified_base 18: mod_base = OTHER; note = 2'-O-methyladenosine-3'-phosphate
  modified_base 19: mod_base = OTHER; note = 2'-O-methylcytidine-3'-phosphate
  modified_base 20: mod_base = OTHER; note = 2'-O-methyladenosine-3'-phosphate
  modified_base 21: mod_base = OTHER; note = 2'-O-methyladenosine-3'-phosphorothioate
  modified_base 22: mod_base = OTHER; note = 2'-O-methyladenosine-3'-phosphorothioate
  modified_base 23: mod_base = OTHER; note = 2'-O-methyladenosine
tttctttagtgtgagacacaaaa

SEQ ID NO: 4 - RNA, 23 nt, synthetic construct
  source 1..23: mol_type = other RNA
ttttgtgtctcacactaaagaaa

SEQ ID NO: 5 - RNA, 21 nt, synthetic construct
  source 1..21: mol_type = other RNA
  modified_base 1: mod_base = OTHER; note = 2'-O-methylguanosine-3'-phosphorothioate
  modified_base 2: mod_base = OTHER; note = 2'-O-methyluridine-3'-phosphorothioate
  modified_base 3: mod_base = OTHER; note = 2'-O-methylguanosine-3'-phosphate
  modified_base 4: mod_base = OTHER; note = 2'-O-methyluridine-3'-phosphate
  modified_base 5: mod_base = OTHER; note = 2'-O-methylcytidine-3'-phosphate
  modified_base 6: mod_base = OTHER; note = 2'-O-methyluridine-3'-phosphate
  modified_base 7: mod_base = OTHER; note = 2'-deoxy-2'-fluorocytidine-3'-phosphate
  modified_base 8: mod_base = OTHER; note = 2'-O-methyladenosine-3'-phosphate
  modified_base 9: mod_base = OTHER; note = 2'-deoxy-2'-fluorocytidine-3'-phosphate
  modified_base 10: mod_base = OTHER; note = 2'-deoxy-2'-fluoroadenosine-3'-phosphate
  modified_base 11: mod_base = OTHER; note = 2'-deoxy-2'-fluorocytidine-3'-phosphate
  modified_base 12: mod_base = OTHER; note = 2'-O-methyluridine-3'-phosphate
  modified_base 13: mod_base = OTHER; note = 2'-O-methyladenosine-3'-phosphate
  modified_base 14: mod_base = OTHER; note = 2'-O-methyladenosine-3'-phosphate
  modified_base 15: mod_base = OTHER; note = 2'-O-methyladenosine-3'-phosphate
  modified_base 16: mod_base = OTHER; note = 2'-O-methylguanosine-3'-phosphate
  modified_base 17: mod_base = OTHER; note = 2'-O-methyladenosine-3'-phosphate
  modified_base 18: mod_base = OTHER; note = 2'-O-methyladenosine-3'-phosphate
  modified_base 19: mod_base = OTHER; note = 2'-O-methyladenosine-3'-phosphate
  modified_base 20: mod_base = OTHER; note = 2'-O-methyluridine-3'-phosphate
  modified_base 21: mod_base = OTHER; note = 2'-O-methyladenosine-3'-phosphate ((2S,4R)-1-[29-[[2-(acetylamino)-2-deoxy-beta-D-galactopyra nosyl]oxy]-14,14-bis[[3-[[3-[[5-[[2-(acetylamino)-2-deoxy-b eta-D-galactopyranosyl]oxy]-1-oxopentyl]amino]propyl]amino] -3-oxopropoxy]methyl]-1,12,19,25-tetraoxo-16-oxa-13,20,24-t riazanonacos-1-yl]-4-hydroxy-2-pyrrolidinyl)methyl ester
gtgtctcacactaaagaaata

SEQ ID NO: 6 - RNA, 23 nt, synthetic construct
  source 1..23: mol_type = other RNA
  modified_base 1: mod_base = OTHER; note = 2'-O-methyluridine-3'-phosphorothioate 5'-(E)-Vinylphosphonate
  modified_base 2: mod_base = OTHER; note = 2'-deoxy-2'-fluoroadenosine-3'-phosphorothioate
  modified_base 3: mod_base = OTHER; note = 2'-O-methyluridine-3'-phosphate
  modified_base 4: mod_base = OTHER; note = 2'-O-methyluridine-3'-phosphate
  modified_base 5: mod_base = OTHER; note = 2'-O-methyluridine-3'-phosphate
  modified_base 6: mod_base = OTHER; note = 2'-deoxy-2'-fluorocytidine-3'-phosphate
  modified_base 7: mod_base = OTHER; note = 2'-O-methyluridine-3'-phosphate
  modified_base 8: mod_base = OTHER; note = 2'-deoxy-2'-fluorouridine-3'-phosphate
  modified_base 9: mod_base = OTHER; note = 2'-deoxy-2'-fluorouridine-3'-phosphate
  modified_base 10: mod_base = OTHER; note = 2'-O-methyladenosine-3'-phosphate
  modified_base 11: mod_base = OTHER; note = 2'-O-methylguanosine-3'-phosphate
  modified_base 12: mod_base = OTHER; note = 2'-O-methyluridine-3'-phosphate
  modified_base 13: mod_base = OTHER; note = 2'-O-methylguanosine-3'-phosphate
  modified_base 14: mod_base = OTHER; note = 2'-deoxy-2'-fluorouridine-3'-phosphate
  modified_base 15: mod_base = OTHER; note = 2'-O-methylguanosine-3'-phosphate
  modified_base 16: mod_base = OTHER; note = 2'-deoxy-2'-fluoroadenosine-3'-phosphate
  modified_base 17: mod_base = OTHER; note = 2'-O-methylguanosine-3'-phosphate
  modified_base 18: mod_base = OTHER; note = 2'-O-methyladenosine-3'-phosphate
  modified_base 19: mod_base = OTHER; note = 2'-O-methylcytidine-3'-phosphate
  modified_base 20: mod_base = OTHER; note = 2'-O-methyladenosine-3'-phosphate
  modified_base 21: mod_base = OTHER; note = 2'-O-methylcytidine-3'-phosphorothioate
  modified_base 22: mod_base = OTHER; note = 2'-O-methyladenosine-3'-phosphorothioate
  modified_base 23: mod_base = OTHER; note = 2'-O-methyladenosine
tatttctttagtgtgagacacaa

SEQ ID NO: 7 - RNA, 23 nt, synthetic construct
  source 1..23: mol_type = other RNA
ttgtgtctcacactaaagaaatg

SEQ ID NO: 8 - RNA, 21 nt, synthetic construct
  source 1..21: mol_type = other RNA
  modified_base 1: mod_base = OTHER; note = 2'-O-methyladenosine-3'-phosphorothioate
  modified_base 2: mod_base = OTHER; note = 2'-O-methyladenosine-3'-phosphorothioate
  modified_base 3: mod_base = OTHER; note = 2'-O-methyluridine-3'-phosphate
  modified_base 4: mod_base = OTHER; note = 2'-O-methyluridine-3'-phosphate
  modified_base 5: mod_base = OTHER; note = 2'-O-methylcytidine-3'-phosphate
  modified_base 6: mod_base = OTHER; note = 2'-O-methyluridine-3'-phosphate
  modified_base 7: mod_base = OTHER; note = 2'-deoxy-2'-fluoroadenosine-3'-phosphate
  modified_base 8: mod_base = OTHER; note = 2'-O-methyladenosine-3'-phosphate
  modified_base 9: mod_base = OTHER; note = 2'-deoxy-2'-fluoroguanosine-3'-phosphate
  modified_base 10: mod_base = OTHER; note = 2'-deoxy-2'-fluoroguanosine-3'-phosphate
  modified_base 11: mod_base = OTHER; note = 2'-deoxy-2'-fluorocytidine-3'-phosphate
  modified_base 12: mod_base = OTHER; note = 2'-O-methyluridine-3'-phosphate
  modified_base 13: mod_base = OTHER; note = 2'-O-methyladenosine-3'-phosphate
  modified_base 14: mod_base = OTHER; note = 2'-O-methyladenosine-3'-phosphate
  modified_base 15: mod_base = OTHER; note = 2'-O-methyladenosine-3'-phosphate
  modified_base 16: mod_base = OTHER; note = 2'-O-methyluridine-3'-phosphate
  modified_base 17: mod_base = OTHER; note = 2'-O-methyladenosine-3'-phosphate
  modified_base 18: mod_base = OTHER; note = 2'-O-methylguanosine-3'-phosphate
  modified_base 19: mod_base = OTHER; note = 2'-O-methylcytidine-3'-phosphate
  modified_base 20: mod_base = OTHER; note = 2'-O-methyluridine-3'-phosphate
  modified_base 21: mod_base = OTHER; note = 2'-O-methyladenosine-3'-phosphate ((2S,4R)-1-[29-[[2-(acetylamino)-2-deoxy-beta-D-galactopyra nosyl]oxy]-14,14-bis[[3-[[3-[[5-[[2-(acetylamino)-2-deoxy-b eta-D-galactopyranosyl]oxy]-1-oxopentyl]amino]propyl]amino] -3-oxopropoxy]methyl]-1,12,19,25-tetraoxo-16-oxa-13,20,24-t riazanonacos-1-yl]-4-hydroxy-2-pyrrolidinyl)methyl ester
aattctaaggctaaatagcta

SEQ ID NO: 9 - RNA, 23 nt, synthetic construct
  source 1..23: mol_type = other RNA
  modified_base 1: mod_base = OTHER; note = 2'-O-methyluridine-3'-phosphorothioate 5'-(E)-Vinylphosphonate
  modified_base 2: mod_base = OTHER; note = 2'-deoxy-2'-fluoroadenosine-3'-phosphorothioate
  modified_base 3: mod_base = OTHER; note = 2'-O-methylguanosine-3'-phosphate
  modified_base 4: mod_base = OTHER; note = 2'-O-methylcytidine-3'-phosphate
  modified_base 5: mod_base = OTHER; note = 2'-O-methyluridine-3'-phosphate
  modified_base 6: mod_base = OTHER; note = 2'-deoxy-2'-fluoroadenosine-3'-phosphate
  modified_base 7: mod_base = OTHER; note = 2'-O-methyluridine-3'-phosphate
  modified_base 8: mod_base = OTHER; note = 2'-deoxy-2'-fluorouridine-3'-phosphate
  modified_base 9: mod_base = OTHER; note = 2'-deoxy-2'-fluorouridine-3'-phosphate
  modified_base 10: mod_base = OTHER; note = 2'-O-methyladenosine-3'-phosphate
  modified_base 11: mod_base = OTHER; note = 2'-O-methylguanosine-3'-phosphate
  modified_base 12: mod_base = OTHER; note = 2'-O-methylcytidine-3'-phosphate
  modified_base 13: mod_base = OTHER; note = 2'-O-methylcytidine-3'-phosphate
  modified_base 14: mod_base = OTHER; note = 2'-deoxy-2'-fluorouridine-3'-phosphate
  modified_base 15: mod_base = OTHER; note = 2'-O-methyluridine-3'-phosphate
  modified_base 16: mod_base = OTHER; note = 2'-deoxy-2'-fluoroadenosine-3'-phosphate
  modified_base 17: mod_base = OTHER; note = 2'-O-methylguanosine-3'-phosphate
  modified_base 18: mod_base = OTHER; note = 2'-O-methyladenosine-3'-phosphate
  modified_base 19: mod_base = OTHER; note = 2'-O-methyladenosine-3'-phosphate
  modified_base 20: mod_base = OTHER; note = 2'-O-methyluridine-3'-phosphate
  modified_base 21: mod_base = OTHER; note = 2'-O-methyluridine-3'-phosphorothioate
  modified_base 22: mod_base = OTHER; note = 2'-O-methylcytidine-3'-phosphorothioate
  modified_base 23: mod_base = OTHER; note = 2'-O-methyluridine
tagctatttagccttagaattct

SEQ ID NO: 10 - RNA, 23 nt, synthetic construct
  source 1..23: mol_type = other RNA
agaattctaaggctaaatagcta

SEQ ID NO: 11 - RNA, 21 nt, synthetic construct
  source 1..21: mol_type = other RNA
  modified_base 1: mod_base = OTHER; note = 2'-O-methylguanosine-3'-phosphorothioate
  modified_base 2: mod_base = OTHER; note = 2'-O-methylguanosine-3'-phosphorothioate
  modified_base 3: mod_base = OTHER; note = 2'-O-methyladenosine-3'-phosphate
  modified_base 4: mod_base = OTHER; note = 2'-O-methyladenosine-3'-phosphate
  modified_base 5: mod_base = OTHER; note = 2'-O-methylguanosine-3'-phosphate
  modified_base 6: mod_base = OTHER; note = 2'-O-methyluridine-3'-phosphate
  modified_base 7: mod_base = OTHER; note = 2'-deoxy-2'-fluoroadenosine-3'-phosphate
  modified_base 8: mod_base = OTHER; note = 2'-O-methyluridine-3'-phosphate
  modified_base 9: mod_base = OTHER; note = 2'-deoxy-2'-fluorouridine-3'-phosphate
  modified_base 10: mod_base = OTHER; note = 2'-deoxy-2'-fluorocytidine-3'-phosphate
  modified_base 11: mod_base = OTHER; note = 2'-deoxy-2'-fluoroadenosine-3'-phosphate
  modified_base 12: mod_base = OTHER; note = 2'-O-methyluridine-3'-phosphate
  modified_base 13: mod_base = OTHER; note = 2'-O-methyluridine-3'-phosphate
  modified_base 14: mod_base = OTHER; note = 2'-O-methylcytidine-3'-phosphate
  modified_base 15: mod_base = OTHER; note = 2'-O-methyladenosine-3'-phosphate
  modified_base 16: mod_base = OTHER; note = 2'-O-methyladenosine-3'-phosphate
  modified_base 17: mod_base = OTHER; note = 2'-O-methyladenosine-3'-phosphate
  modified_base 18: mod_base = OTHER; note = 2'-O-methylcytidine-3'-phosphate
  modified_base 19: mod_base = OTHER; note = 2'-O-methyluridine-3'-phosphate
  modified_base 20: mod_base = OTHER; note = 2'-O-methyluridine-3'-phosphate
  modified_base 21: mod_base = OTHER; note = 2'-O-methyladenosine-3'-phosphate ((2S,4R)-1-[29-[[2-(acetylamino)-2-deoxy-beta-D-galactopyra nosyl]oxy]-14,14-bis[[3-[[3-[[5-[[2-(acetylamino)-2-deoxy-b eta-D-galactopyranosyl]oxy]-1-oxopentyl]amino]propyl]amino] -3-oxopropoxy]methyl]-1,12,19,25-tetraoxo-16-oxa-13,20,24-t riazanonacos-1-yl]-4-hydroxy-2-pyrrolidinyl)methyl ester
ggaagtattcattcaaactta

SEQ ID NO: 12 - RNA, 23 nt, synthetic construct
  source 1..23: mol_type = other RNA
  modified_base 1: mod_base = OTHER; note = 2'-O-methyluridine-3'-phosphorothioate 5'-(E)-Vinylphosphonate
  modified_base 2: mod_base = OTHER; note = 2'-deoxy-2'-fluoroadenosine-3'-phosphorothioate
  modified_base 3: mod_base = OTHER; note = 2'-O-methyladenosine-3'-phosphate
  modified_base 4: mod_base = OTHER; note = 2'-O-methylguanosine-3'-phosphate
  modified_base 5: mod_base = OTHER; note = 2'-O-methyluridine-3'-phosphate
  modified_base 6: mod_base = OTHER; note = 2'-deoxy-2'-fluorouridine-3'-phosphate
  modified_base 7: mod_base = OTHER; note = 2'-O-methyluridine-3'-phosphate
  modified_base 8: mod_base = OTHER; note = 2'-deoxy-2'-fluoroguanosine-3'-phosphate
  modified_base 9: mod_base = OTHER; note = 2'-deoxy-2'-fluoroadenosine-3'-phosphate
  modified_base 10: mod_base = OTHER; note = 2'-O-methyladenosine-3'-phosphate
  modified_base 11: mod_base = OTHER; note = 2'-O-methyluridine-3'-phosphate
  modified_base 12: mod_base = OTHER; note = 2'-O-methylguanosine-3'-phosphate
  modified_base 13: mod_base = OTHER; note = 2'-O-methyladenosine-3'-phosphate
  modified_base 14: mod_base = OTHER; note = 2'-deoxy-2'-fluoroadenosine-3'-phosphate
  modified_base 15: mod_base = OTHER; note = 2'-O-methyluridine-3'-phosphate
  modified_base 16: mod_base = OTHER; note = 2'-deoxy-2'-fluoroadenosine-3'-phosphate
  modified_base 17: mod_base = OTHER; note = 2'-O-methylcytidine-3'-phosphate
  modified_base 18: mod_base = OTHER; note = 2'-O-methyluridine-3'-phosphate
  modified_base 19: mod_base = OTHER; note = 2'-O-methyluridine-3'-phosphate
  modified_base 20: mod_base = OTHER; note = 2'-O-methylcytidine-3'-phosphate
  modified_base 21: mod_base = OTHER; note = 2'-O-methylcytidine-3'-phosphorothioate
  modified_base 22: mod_base = OTHER; note = 2'-O-methyluridine-3'-phosphorothioate
  modified_base 23: mod_base = OTHER; note = 2'-O-methyladenosine
taagtttgaatgaatacttccta

SEQ ID NO: 13 - RNA, 23 nt, synthetic construct
  source 1..23: mol_type = other RNA
taggaagtattcattcaaacttg

SEQ ID NO: 14 - RNA, 21 nt, synthetic construct
  source 1..21: mol_type = other RNA
  modified_base 1: mod_base = OTHER; note = 2'-O-methyluridine-3'-phosphorothioate
  modified_base 2: mod_base = OTHER; note = 2'-O-methyluridine-3'-phosphorothioate
  modified_base 3: mod_base = OTHER; note = 2'-O-methylcytidine-3'-phosphate
  modified_base 4: mod_base = OTHER; note = 2'-O-methyladenosine-3'-phosphate
  modified_base 5: mod_base = OTHER; note = 2'-O-methyluridine-3'-phosphate
  modified_base 6: mod_base = OTHER; note = 2'-O-methyluridine-3'-phosphate
  modified_base 7: mod_base = OTHER; note = 2'-deoxy-2'-fluorocytidine-3'-phosphate
  modified_base 8: mod_base = OTHER; note = 2'-O-methyladenosine-3'-phosphate
  modified_base 9: mod_base = OTHER; note = 2'-deoxy-2'-fluoroadenosine-3'-phosphate
  modified_base 10: mod_base = OTHER; note = 2'-deoxy-2'-fluoroadenosine-3'-phosphate
  modified_base 11: mod_base = OTHER; note = 2'-deoxy-2'-fluorocytidine-3'-phosphate
  modified_base 12: mod_base = OTHER; note = 2'-O-methyluridine-3'-phosphate
  modified_base 13: mod_base = OTHER; note = 2'-O-methyluridine-3'-phosphate
  modified_base 14: mod_base = OTHER; note = 2'-O-methylguanosine-3'-phosphate
  modified_base 15: mod_base = OTHER; note = 2'-O-methyladenosine-3'-phosphate
  modified_base 16: mod_base = OTHER; note = 2'-O-methyladenosine-3'-phosphate
  modified_base 17: mod_base = OTHER; note = 2'-O-methyluridine-3'-phosphate
  modified_base 18: mod_base = OTHER; note = 2'-O-methyladenosine-3'-phosphate
  modified_base 19: mod_base = OTHER; note = 2'-O-methyluridine-3'-phosphate
  modified_base 20: mod_base = OTHER; note = 2'-O-methyluridine-3'-phosphate
  modified_base 21: mod_base = OTHER; note = 2'-O-methyladenosine-3'-phosphate ((2S,4R)-1-[29-[[2-(acetylamino)-2-deoxy-beta-D-galactopyra nosyl]oxy]-14,14-bis[[3-[[3-[[5-[[2-(acetylamino)-2-deoxy-b eta-D-galactopyranosyl]oxy]-1-oxopentyl]amino]propyl]amino] -3-oxopropoxy]methyl]-1,12,19,25-tetraoxo-16-oxa-13,20,24-t riazanonacos-1-yl]-4-hydroxy-2-pyrrolidinyl)methyl ester
ttcattcaaacttgaatatta

SEQ ID NO: 15 - RNA, 23 nt, synthetic construct
  source 1..23: mol_type = other RNA
  modified_base 1: mod_base = OTHER; note = 2'-O-methyluridine-3'-phosphorothioate 5'-(E)-Vinylphosphonate
  modified_base 2: mod_base = OTHER; note = 2'-deoxy-2'-fluoroadenosine-3'-phosphorothioate
  modified_base 3: mod_base = OTHER; note = 2'-O-methyladenosine-3'-phosphate
  modified_base 4: mod_base = OTHER; note = 2'-O-methyluridine-3'-phosphate
  modified_base 5: mod_base = OTHER; note = 2'-O-methyladenosine-3'-phosphate
  modified_base 6: mod_base = OTHER; note = 2'-deoxy-2'-fluorouridine-3'-phosphate
  modified_base 7: mod_base = OTHER; note = 2'-O-methyluridine-3'-phosphate
  modified_base 8: mod_base = OTHER; note = 2'-deoxy-2'-fluorocytidine-3'-phosphate
  modified_base 9: mod_base = OTHER; note = 2'-deoxy-2'-fluoroadenosine-3'-phosphate
  modified_base 10: mod_base = OTHER; note = 2'-O-methyladenosine-3'-phosphate
  modified_base 11: mod_base = OTHER; note = 2'-O-methylguanosine-3'-phosphate
  modified_base 12: mod_base = OTHER; note = 2'-O-methyluridine-3'-phosphate
  modified_base 13: mod_base = OTHER; note = 2'-O-methyluridine-3'-phosphate
  modified_base 14: mod_base = OTHER; note = 2'-deoxy-2'-fluorouridine-3'-phosphate
  modified_base 15: mod_base = OTHER; note = 2'-O-methylguanosine-3'-phosphate
  modified_base 16: mod_base = OTHER; note = 2'-deoxy-2'-fluoroadenosine-3'-phosphate
  modified_base 17: mod_base = OTHER; note = 2'-O-methyladenosine-3'-phosphate
  modified_base 18: mod_base = OTHER; note = 2'-O-methyluridine-3'-phosphate
  modified_base 19: mod_base = OTHER; note = 2'-O-methylguanosine-3'-phosphate
  modified_base 20: mod_base = OTHER; note = 2'-O-methyladenosine-3'-phosphate
  modified_base 21: mod_base = OTHER; note = 2'-O-methyladenosine-3'-phosphorothioate
  modified_base 22: mod_base = OTHER; note = 2'-O-methyluridine-3'-phosphorothioate
  modified_base 23: mod_base = OTHER; note = 2'-O-methyladenosine
taatattcaagtttgaatgaata

SEQ ID NO: 16 - RNA, 23 nt, synthetic construct
  source 1..23: mol_type = other RNA
tattcattcaaacttgaatattc

SEQ ID NO: 17 - RNA, 21 nt, synthetic construct
  source 1..21: mol_type = other RNA
  modified_base 1: mod_base = OTHER; note = 2'-O-methyluridine-3'-phosphorothioate
  modified_base 2: mod_base = OTHER; note = 2'-O-methylcytidine-3'-phosphorothioate
  modified_base 3: mod_base = OTHER; note = 2'-O-methyladenosine-3'-phosphate
  modified_base 4: mod_base = OTHER; note = 2'-O-methyluridine-3'-phosphate
  modified_base 5: mod_base = OTHER; note = 2'-O-methyluridine-3'-phosphate
  modified_base 6: mod_base = OTHER; note = 2'-O-methylcytidine-3'-phosphate
  modified_base 7: mod_base = OTHER; note = 2'-deoxy-2'-fluoroadenosine-3'-phosphate
  modified_base 8: mod_base = OTHER; note = 2'-O-methyladenosine-3'-phosphate
  modified_base 9: mod_base = OTHER; note = 2'-deoxy-2'-fluoroadenosine-3'-phosphate
  modified_base 10: mod_base = OTHER; note = 2'-deoxy-2'-fluorocytidine-3'-phosphate
  modified_base 11: mod_base = OTHER; note = 2'-deoxy-2'-fluorouridine-3'-phosphate
  modified_base 12: mod_base = OTHER; note = 2'-O-methyluridine-3'-phosphate
  modified_base 13: mod_base = OTHER; note = 2'-O-methylguanosine-3'-phosphate
  modified_base 14: mod_base = OTHER; note = 2'-O-methyladenosine-3'-phosphate
  modified_base 15: mod_base = OTHER; note = 2'-O-methyladenosine-3'-phosphate
  modified_base 16: mod_base = OTHER; note = 2'-O-methyluridine-3'-phosphate
  modified_base 17: mod_base = OTHER; note = 2'-O-methyladenosine-3'-phosphate
  modified_base 18: mod_base = OTHER; note = 2'-O-methyluridine-3'-phosphate
  modified_base 19: mod_base = OTHER; note = 2'-O-methyluridine-3'-phosphate
  modified_base 20: mod_base = OTHER; note = 2'-O-methylcytidine-3'-phosphate
  modified_base 21: mod_base = OTHER; note = 2'-O-methyladenosine-3'-phosphate ((2S,4R)-1-[29-[[2-(acetylamino)-2-deoxy-beta-D-galactopyra nosyl]oxy]-14,14-bis[[3-[[3-[[5-[[2-(acetylamino)-2-deoxy-b eta-D-galactopyranosyl]oxy]-1-oxopentyl]amino]propyl]amino] -3-oxopropoxy]methyl]-1,12,19,25-tetraoxo-16-oxa-13,20,24-t riazanonacos-1-yl]-4-hydroxy-2-pyrrolidinyl)methyl ester
tcattcaaacttgaatattca

SEQ ID NO: 18 - RNA, 23 nt, synthetic construct
  source 1..23: mol_type = other RNA
  modified_base 1: mod_base = OTHER; note = 2'-O-methyluridine-3'-phosphorothioate 5'-(E)-Vinylphosphonate
  modified_base 2: mod_base = OTHER; note = 2'-deoxy-2'-fluoroguanosine-3'-phosphorothioate
  modified_base 3: mod_base = OTHER; note = 2'-O-methyladenosine-3'-phosphate
  modified_base 4: mod_base = OTHER; note = 2'-O-methyladenosine-3'-phosphate
  modified_base 5: mod_base = OTHER; note = 2'-O-methyluridine-3'-phosphate
  modified_base 6: mod_base = OTHER; note = 2'-deoxy-2'-fluoroadenosine-3'-phosphate
  modified_base 7: mod_base = OTHER; note = 2'-O-methyluridine-3'-phosphate
  modified_base 8: mod_base = OTHER; note = 2'-deoxy-2'-fluorouridine-3'-phosphate
  modified_base 9: mod_base = OTHER; note = 2'-deoxy-2'-fluorocytidine-3'-phosphate
  modified_base 10: mod_base = OTHER; note = 2'-O-methyladenosine-3'-phosphate
  modified_base 11: mod_base = OTHER; note = 2'-O-methyladenosine-3'-phosphate
  modified_base 12: mod_base = OTHER; note = 2'-O-methylguanosine-3'-phosphate
  modified_base 13: mod_base = OTHER; note = 2'-O-methyluridine-3'-phosphate
  modified_base 14: mod_base = OTHER; note = 2'-deoxy-2'-fluorouridine-3'-phosphate
  modified_base 15: mod_base = OTHER; note = 2'-O-methyluridine-3'-phosphate
  modified_base 16: mod_base = OTHER; note = 2'-deoxy-2'-fluoroguanosine-3'-phosphate
  modified_base 17: mod_base = OTHER; note = 2'-O-methyladenosine-3'-phosphate
  modified_base 18: mod_base = OTHER; note = 2'-O-methyladenosine-3'-phosphate
  modified_base 19: mod_base = OTHER; note = 2'-O-methyluridine-3'-phosphate
  modified_base 20: mod_base = OTHER; note = 2'-O-methylguanosine-3'-phosphate
  modified_base 21: mod_base = OTHER; note = 2'-O-methyladenosine-3'-phosphorothioate
  modified_base 22: mod_base = OTHER; note = 2'-O-methyladenosine-3'-phosphorothioate
  modified_base 23: mod_base = OTHER; note = 2'-O-methyluridine
tgaatattcaagtttgaatgaat

SEQ ID NO: 19 - RNA, 23 nt, synthetic construct
  source 1..23: mol_type = other RNA
attcattcaaacttgaatattct

SEQ ID NO: 20 - RNA, 21 nt, synthetic construct
  source 1..21: mol_type = other RNA
  modified_base 1: mod_base = OTHER; note = 2'-O-methylcytidine-3'-phosphorothioate
  modified_base 2: mod_base = OTHER; note = 2'-O-methyladenosine-3'-phosphorothioate
  modified_base 3: mod_base = OTHER; note = 2'-O-methyluridine-3'-phosphate
  modified_base 4: mod_base = OTHER; note = 2'-O-methyluridine-3'-phosphate
  modified_base 5: mod_base = OTHER; note = 2'-O-methylcytidine-3'-phosphate
  modified_base 6: mod_base = OTHER; note = 2'-O-methyladenosine-3'-phosphate
  modified_base 7: mod_base = OTHER; note = 2'-deoxy-2'-fluoroadenosine-3'-phosphate
  modified_base 8: mod_base = OTHER; note = 2'-O-methyladenosine-3'-phosphate
  modified_base 9: mod_base = OTHER; note = 2'-deoxy-2'-fluorocytidine-3'-phosphate
  modified_base 10: mod_base = OTHER; note = 2'-deoxy-2'-fluorouridine-3'-phosphate
  modified_base 11: mod_base = OTHER; note = 2'-deoxy-2'-fluorouridine-3'-phosphate
  modified_base 12: mod_base = OTHER; note = 2'-O-methylguanosine-3'-phosphate
  modified_base 13: mod_base = OTHER; note = 2'-O-methyladenosine-3'-phosphate
  modified_base 14: mod_base = OTHER; note = 2'-O-methyladenosine-3'-phosphate
  modified_base 15: mod_base = OTHER; note = 2'-O-methyluridine-3'-phosphate
  modified_base 16: mod_base = OTHER; note = 2'-O-methyladenosine-3'-phosphate
  modified_base 17: mod_base = OTHER; note = 2'-O-methyluridine-3'-phosphate
  modified_base 18: mod_base = OTHER; note = 2'-O-methyluridine-3'-phosphate
  modified_base 19: mod_base = OTHER; note = 2'-O-methylcytidine-3'-phosphate
  modified_base 20: mod_base = OTHER; note = 2'-O-methyluridine-3'-phosphate
  modified_base 21: mod_base = OTHER; note = 2'-O-methyladenosine-3'-phosphate ((2S,4R)-1-[29-[[2-(acetylamino)-2-deoxy-beta-D-galactopyra nosyl]oxy]-14,14-bis[[3-[[3-[[5-[[2-(acetylamino)-2-deoxy-b eta-D-galactopyranosyl]oxy]-1-oxopentyl]amino]propyl]amino] -3-oxopropoxy]methyl]-1,12,19,25-tetraoxo-16-oxa-13,20,24-t riazanonacos-1-yl]-4-hydroxy-2-pyrrolidinyl)methyl ester
cattcaaacttgaatattcta

SEQ ID NO: 21 - RNA, 23 nt, synthetic construct
  source 1..23: mol_type = other RNA
  modified_base 1: mod_base = OTHER; note = 2'-O-methyluridine-3'-phosphorothioate 5'-(E)-Vinylphosphonate
  modified_base 2: mod_base = OTHER; note = 2'-deoxy-2'-fluoroadenosine-3'-phosphorothioate
  modified_base 3: mod_base = OTHER; note = 2'-O-methylguanosine-3'-phosphate
  modified_base 4: mod_base = OTHER; note = 2'-O-methyladenosine-3'-phosphate
  modified_base 5: mod_base = OTHER; note = 2'-O-methyladenosine-3'-phosphate
  modified_base 6: mod_base = OTHER; note = 2'-deoxy-2'-fluorouridine-3'-phosphate
  modified_base 7: mod_base = OTHER; note = 2'-O-methyladenosine-3'-phosphate
  modified_base 8: mod_base = OTHER; note = 2'-deoxy-2'-fluorouridine-3'-phosphate
  modified_base 9: mod_base = OTHER; note = 2'-deoxy-2'-fluorouridine-3'-phosphate
  modified_base 10: mod_base = OTHER; note = 2'-O-methylcytidine-3'-phosphate
  modified_base 11: mod_base = OTHER; note = 2'-O-methyladenosine-3'-phosphate
  modified_base 12: mod_base = OTHER; note = 2'-O-methyladenosine-3'-phosphate
  modified_base 13: mod_base = OTHER; note = 2'-O-methylguanosine-3'-phosphate
  modified_base 14: mod_base = OTHER; note = 2'-deoxy-2'-fluorouridine-3'-phosphate
  modified_base 15: mod_base = OTHER; note = 2'-O-methyluridine-3'-phosphate
  modified_base 16: mod_base = OTHER; note = 2'-deoxy-2'-fluorouridine-3'-phosphate
  modified_base 17: mod_base = OTHER; note = 2'-O-methylguanosine-3'-phosphate
  modified_base 18: mod_base = OTHER; note = 2'-O-methyladenosine-3'-phosphate
  modified_base 19: mod_base = OTHER; note = 2'-O-methyladenosine-3'-phosphate
  modified_base 20: mod_base = OTHER; note = 2'-O-methyluridine-3'-phosphate
  modified_base 21: mod_base = OTHER; note = 2'-O-methylguanosine-3'-phosphorothioate
  modified_base 22: mod_base = OTHER; note = 2'-O-methyladenosine-3'-phosphorothioate
  modified_base 23: mod_base = OTHER; note = 2'-O-methyladenosine
tagaatattcaagtttgaatgaa

SEQ ID NO: 22 - RNA, 23 nt, synthetic construct
  source 1..23: mol_type = other RNA
ttcattcaaacttgaatattctt

SEQ ID NO: 23 - RNA, 21 nt, synthetic construct
  source 1..21: mol_type = other RNA
  modified_base 1: mod_base = OTHER; note = 2'-O-methyluridine-3'-phosphorothioate
  modified_base 2: mod_base = OTHER; note = 2'-O-methylcytidine-3'-phosphorothioate
  modified_base 3: mod_base = OTHER; note = 2'-O-methyladenosine-3'-phosphate
  modified_base 4: mod_base = OTHER; note = 2'-O-methyladenosine-3'-phosphate
  modified_base 5: mod_base = OTHER; note = 2'-O-methyladenosine-3'-phosphate
  modified_base 6: mod_base = OTHER; note = 2'-O-methylcytidine-3'-phosphate
  modified_base 7: mod_base = OTHER; note = 2'-deoxy-2'-fluorouridine-3'-phosphate
  modified_base 8: mod_base = OTHER; note = 2'-O-methyluridine-3'-phosphate
  modified_base 9: mod_base = OTHER; note = 2'-deoxy-2'-fluoroguanosine-3'-phosphate
  modified_base 10: mod_base = OTHER; note = 2'-deoxy-2'-fluoroadenosine-3'-phosphate
  modified_base 11: mod_base = OTHER; note = 2'-deoxy-2'-fluoroadenosine-3'-phosphate
  modified_base 12: mod_base = OTHER; note = 2'-O-methyluridine-3'-phosphate
  modified_base 13: mod_base = OTHER; note = 2'-O-methyladenosine-3'-phosphate
  modified_base 14: mod_base = OTHER; note = 2'-O-methyluridine-3'-phosphate
  modified_base 15: mod_base = OTHER; note = 2'-O-methyluridine-3'-phosphate
  modified_base 16: mod_base = OTHER; note = 2'-O-methylcytidine-3'-phosphate
  modified_base 17: mod_base = OTHER; note = 2'-O-methyluridine-3'-phosphate
  modified_base 18: mod_base = OTHER; note = 2'-O-methyluridine-3'-phosphate
  modified_base 19: mod_base = OTHER; note = 2'-O-methylcytidine-3'-phosphate
  modified_base 20: mod_base = OTHER; note = 2'-O-methyladenosine-3'-phosphate
  modified_base 21: mod_base = OTHER; note = 2'-O-methyladenosine-3'-phosphate ((2S,4R)-1-[29-[[2-(acetylamino)-2-deoxy-beta-D-galactopyra nosyl]oxy]-14,14-bis[[3-[[3-[[5-[[2-(acetylamino)-2-deoxy-b eta-D-galactopyranosyl]oxy]-1-oxopentyl]amino]propyl]amino] -3-oxopropoxy]methyl]-1,12,19,25-tetraoxo-16-oxa-13,20,24-t riazanonacos-1-yl]-4-hydroxy-2-pyrrolidinyl)methyl ester
tcaaacttgaatattcttcaa

SEQ ID NO: 24 - RNA, 23 nt, synthetic construct
  source 1..23: mol_type = other RNA
  modified_base 1: mod_base = OTHER; note = 2'-O-methyluridine-3'-phosphorothioate 5'-(E)-Vinylphosphonate
  modified_base 2: mod_base = OTHER; note = 2'-deoxy-2'-fluorouridine-3'-phosphorothioate
  modified_base 3: mod_base = OTHER; note = 2'-O-methylguanosine-3'-phosphate
  modified_base 4: mod_base = OTHER; note = 2'-O-methyladenosine-3'-phosphate
  modified_base 5: mod_base = OTHER; note = 2'-O-methyladenosine-3'-phosphate
  modified_base 6: mod_base = OTHER; note = 2'-deoxy-2'-fluoroguanosine-3'-phosphate
  modified_base 7: mod_base = OTHER; note = 2'-O-methyladenosine-3'-phosphate
  modified_base 8: mod_base = OTHER; note = 2'-deoxy-2'-fluoroadenosine-3'-phosphate
  modified_base 9: mod_base = OTHER; note = 2'-deoxy-2'-fluorouridine-3'-phosphate
  modified_base 10: mod_base = OTHER; note = 2'-O-methyladenosine-3'-phosphate
  modified_base 11: mod_base = OTHER; note = 2'-O-methyluridine-3'-phosphate
  modified_base 12: mod_base = OTHER; note = 2'-O-methyluridine-3'-phosphate
  modified_base 13: mod_base = OTHER; note = 2'-O-methylcytidine-3'-phosphate
  modified_base 14: mod_base = OTHER; note = 2'-deoxy-2'-fluoroadenosine-3'-phosphate
  modified_base 15: mod_base = OTHER; note = 2'-O-methyladenosine-3'-phosphate
  modified_base 16: mod_base = OTHER; note = 2'-deoxy-2'-fluoroguanosine-3'-phosphate
  modified_base 17: mod_base = OTHER; note = 2'-O-methyluridine-3'-phosphate
  modified_base 18: mod_base = OTHER; note = 2'-O-methyluridine-3'-phosphate
  modified_base 19: mod_base = OTHER; note = 2'-O-methyluridine-3'-phosphate
  modified_base 20: mod_base = OTHER; note = 2'-O-methylguanosine-3'-phosphate
  modified_base 21: mod_base = OTHER; note = 2'-O-methyladenosine-3'-phosphorothioate
  modified_base 22: mod_base = OTHER; note = 2'-O-methyladenosine-3'-phosphorothioate
  modified_base 23: mod_base = OTHER; note = 2'-O-methyluridine
ttgaagaatattcaagtttgaat

SEQ ID NO: 25 - RNA, 23 nt, synthetic construct
  source 1..23: mol_type = other RNA
attcaaacttgaatattcttcaa

SEQ ID NO: 26 - RNA, 21 nt, synthetic construct
  source 1..21: mol_type = other RNA
  modified_base 1: mod_base = OTHER; note = 2'-O-methylcytidine-3'-phosphorothioate
  modified_base 2: mod_base = OTHER; note = 2'-O-methyladenosine-3'-phosphorothioate
  modified_base 3: mod_base = OTHER; note = 2'-O-methyladenosine-3'-phosphate
  modified_base 4: mod_base = OTHER; note = 2'-O-methyladenosine-3'-phosphate
  modified_base 5: mod_base = OTHER; note = 2'-O-methylcytidine-3'-phosphate
  modified_base 6: mod_base = OTHER; note = 2'-O-methyluridine-3'-phosphate
  modified_base 7: mod_base = OTHER; note = 2'-deoxy-2'-fluorouridine-3'-phosphate
  modified_base 8: mod_base = OTHER; note = 2'-O-methylguanosine-3'-phosphate
  modified_base 9: mod_base = OTHER; note = 2'-deoxy-2'-fluoroadenosine-3'-phosphate
  modified_base 10: mod_base = OTHER; note = 2'-deoxy-2'-fluoroadenosine-3'-phosphate
  modified_base 11: mod_base = OTHER; note = 2'-deoxy-2'-fluorouridine-3'-phosphate
  modified_base 12: mod_base = OTHER; note = 2'-O-methyladenosine-3'-phosphate
  modified_base 13: mod_base = OTHER; note = 2'-O-methyluridine-3'-phosphate
  modified_base 14: mod_base = OTHER; note = 2'-O-methyluridine-3'-phosphate
  modified_base 15: mod_base = OTHER; note = 2'-O-methylcytidine-3'-phosphate
  modified_base 16: mod_base = OTHER; note = 2'-O-methyluridine-3'-phosphate
  modified_base 17: mod_base = OTHER; note = 2'-O-methyluridine-3'-phosphate
  modified_base 18: mod_base = OTHER; note = 2'-O-methylcytidine-3'-phosphate
  modified_base 19: mod_base = OTHER; note = 2'-O-methyladenosine-3'-phosphate
  modified_base 20: mod_base = OTHER; note = 2'-O-methyladenosine-3'-phosphate
  modified_base 21: mod_base = OTHER; note = 2'-O-methyladenosine-3'-phosphate ((2S,4R)-1-[29-[[2-(acetylamino)-2-deoxy-beta-D-galactopyra nosyl]oxy]-14,14-bis[[3-[[3-[[5-[[2-(acetylamino)-2-deoxy-b eta-D-galactopyranosyl]oxy]-1-oxopentyl]amino]propyl]amino] -3-oxopropoxy]methyl]-1,12,19,25-tetraoxo-16-oxa-13,20,24-t riazanonacos-1-yl]-4-hydroxy-2-pyrrolidinyl)methyl ester
caaacttgaatattcttcaaa

SEQ ID NO: 27 - RNA, 23 nt, synthetic construct
  source 1..23: mol_type = other RNA
  modified_base 1: mod_base = OTHER; note = 2'-O-methyluridine-3'-phosphorothioate 5'-(E)-Vinylphosphonate
  modified_base 2: mod_base = OTHER; note = 2'-deoxy-2'-fluorouridine-3'-phosphorothioate
  modified_base 3: mod_base = OTHER; note = 2'-O-methyluridine-3'-phosphate
  modified_base 4: mod_base = OTHER; note = 2'-O-methylguanosine-3'-phosphate
  modified_base 5: mod_base = OTHER; note = 2'-O-methyladenosine-3'-phosphate
  modified_base 6: mod_base = OTHER; note = 2'-deoxy-2'-fluoroadenosine-3'-phosphate
  modified_base 7: mod_base = OTHER; note = 2'-O-methylguanosine-3'-phosphate
  modified_base 8: mod_base = OTHER; note = 2'-deoxy-2'-fluoroadenosine-3'-phosphate
  modified_base 9: mod_base = OTHER; note = 2'-deoxy-2'-fluoroadenosine-3'-phosphate
  modified_base 10: mod_base = OTHER; note = 2'-O-methyluridine-3'-phosphate
  modified_base 11: mod_base = OTHER; note = 2'-O-methyladenosine-3'-phosphate
  modified_base 12: mod_base = OTHER; note = 2'-O-methyluridine-3'-phosphate
  modified_base 13: mod_base = OTHER; note = 2'-O-methyluridine-3'-phosphate
  modified_base 14: mod_base = OTHER; note = 2'-deoxy-2'-fluorocytidine-3'-phosphate
  modified_base 15: mod_base = OTHER; note = 2'-O-methyladenosine-3'-phosphate
  modified_base 16: mod_base = OTHER; note = 2'-deoxy-2'-fluoroadenosine-3'-phosphate
  modified_base 17: mod_base = OTHER; note = 2'-O-methylguanosine-3'-phosphate
  modified_base 18: mod_base = OTHER; note = 2'-O-methyluridine-3'-phosphate
  modified_base 19: mod_base = OTHER; note = 2'-O-methyluridine-3'-phosphate
  modified_base 20: mod_base = OTHER; note = 2'-O-methyluridine-3'-phosphate
  modified_base 21: mod_base = OTHER; note = 2'-O-methylguanosine-3'-phosphorothioate
  modified_base 22: mod_base = OTHER; note = 2'-O-methyladenosine-3'-phosphorothioate
  modified_base 23: mod_base = OTHER; note = 2'-O-methyladenosine
tttgaagaatattcaagtttgaa

SEQ ID NO: 28 - RNA, 23 nt, synthetic construct
  source 1..23: mol_type = other RNA
ttcaaacttgaatattcttcaaa

SEQ ID NO: 29 - RNA, 21 nt, synthetic construct
  source 1..21: mol_type = other RNA
  modified_base 1: mod_base = OTHER; note = 2'-O-methyladenosine-3'-phosphorothioate
  modified_base 2: mod_base = OTHER; note = 2'-O-methyladenosine-3'-phosphorothioate
  modified_base 3: mod_base = OTHER; note = 2'-O-methyladenosine-3'-phosphate
  modified_base 4: mod_base = OTHER; note = 2'-O-methylcytidine-3'-phosphate
  modified_base 5: mod_base = OTHER; note = 2'-O-methyluridine-3'-phosphate
  modified_base 6: mod_base = OTHER; note = 2'-O-methyluridine-3'-phosphate
  modified_base 7: mod_base = OTHER; note = 2'-deoxy-2'-fluoroguanosine-3'-phosphate
  modified_base 8: mod_base = OTHER; note = 2'-O-methyladenosine-3'-phosphate
  modified_base 9: mod_base = OTHER; note = 2'-deoxy-2'-fluoroadenosine-3'-phosphate
  modified_base 10: mod_base = OTHER; note = 2'-deoxy-2'-fluorouridine-3'-phosphate
  modified_base 11: mod_base = OTHER; note = 2'-deoxy-2'-fluoroadenosine-3'-phosphate
  modified_base 12: mod_base = OTHER; note = 2'-O-methyluridine-3'-phosphate
  modified_base 13: mod_base = OTHER; note = 2'-O-methyluridine-3'-phosphate
  modified_base 14: mod_base = OTHER; note = 2'-O-methylcytidine-3'-phosphate
  modified_base 15: mod_base = OTHER; note = 2'-O-methyluridine-3'-phosphate
  modified_base 16: mod_base = OTHER; note = 2'-O-methyluridine-3'-phosphate
  modified_base 17: mod_base = OTHER; note = 2'-O-methylcytidine-3'-phosphate
  modified_base 18: mod_base = OTHER; note = 2'-O-methyladenosine-3'-phosphate
  modified_base 19: mod_base = OTHER; note = 2'-O-methyladenosine-3'-phosphate
  modified_base 20: mod_base = OTHER; note = 2'-O-methyladenosine-3'-phosphate
  modified_base 21: mod_base = OTHER; note = 2'-O-methyladenosine-3'-phosphate ((2S,4R)-1-[29-[[2-(acetylamino)-2-deoxy-beta-D-galactopyra nosyl]oxy]-14,14-bis[[3-[[3-[[5-[[2-(acetylamino)-2-deoxy-b eta-D-galactopyranosyl]oxy]-1-oxopentyl]amino]propyl]amino] -3-oxopropoxy]methyl]-1,12,19,25-tetraoxo-16-oxa-13,20,24-t riazanonacos-1-yl]-4-hydroxy-2-pyrrolidinyl)methyl ester
aaacttgaatattcttcaaaa

SEQ ID NO: 30 - RNA, 23 nt, synthetic construct
  source 1..23: mol_type = other RNA
  modified_base 1: mod_base = OTHER; note = 2'-O-methyluridine-3'-phosphorothioate 5'-(E)-Vinylphosphonate
  modified_base 2: mod_base = OTHER; note = 2'-deoxy-2'-fluorouridine-3'-phosphorothioate
  modified_base 3: mod_base = OTHER; note = 2'-O-methyluridine-3'-phosphate
  modified_base 4: mod_base = OTHER; note = 2'-O-methyluridine-3'-phosphate
  modified_base 5: mod_base = OTHER; note = 2'-O-methylguanosine-3'-phosphate
  modified_base 6: mod_base = OTHER; note = 2'-deoxy-2'-fluoroadenosine-3'-phosphate
  modified_base 7: mod_base = OTHER; note = 2'-O-methyladenosine-3'-phosphate
  modified_base 8: mod_base = OTHER; note = 2'-deoxy-2'-fluoroguanosine-3'-phosphate
  modified_base 9: mod_base = OTHER; note = 2'-deoxy-2'-fluoroadenosine-3'-phosphate
  modified_base 10: mod_base = OTHER; note = 2'-O-methyladenosine-3'-phosphate
  modified_base 11: mod_base = OTHER; note = 2'-O-methyluridine-3'-phosphate
  modified_base 12: mod_base = OTHER; note = 2'-O-methyladenosine-3'-phosphate
  modified_base 13: mod_base = OTHER; note = 2'-O-methyluridine-3'-phosphate
  modified_base 14: mod_base = OTHER; note = 2'-deoxy-2'-fluorouridine-3'-phosphate
  modified_base 15: mod_base = OTHER; note = 2'-O-methylcytidine-3'-phosphate
  modified_base 16: mod_base = OTHER; note = 2'-deoxy-2'-fluoroadenosine-3'-phosphate
  modified_base 17: mod_base = OTHER; note = 2'-O-methyladenosine-3'-phosphate
  modified_base 18: mod_base = OTHER; note = 2'-O-methylguanosine-3'-phosphate
  modified_base 19: mod_base = OTHER; note = 2'-O-methyluridine-3'-phosphate
  modified_base 20: mod_base = OTHER; note = 2'-O-methyluridine-3'-phosphate
  modified_base 21: mod_base = OTHER; note = 2'-O-methyluridine-3'-phosphorothioate
  modified_base 22: mod_base = OTHER; note = 2'-O-methylguanosine-3'-phosphorothioate
  modified_base 23: mod_base = OTHER; note = 2'-O-methyladenosine
ttttgaagaatattcaagtttga

SEQ ID NO: 31 - RNA, 23 nt, synthetic construct
  source 1..23: mol_type = other RNA
tcaaacttgaatattcttcaaag

SEQ ID NO: 32 - RNA, 21 nt, synthetic construct
  source 1..21: mol_type = other RNA
  modified_base 1: mod_base = OTHER; note = 2'-O-methylcytidine-3'-phosphorothioate
  modified_base 2: mod_base = OTHER; note = 2'-O-methyluridine-3'-phosphorothioate
  modified_base 3: mod_base = OTHER; note = 2'-O-methyluridine-3'-phosphate
  modified_base 4: mod_base = OTHER; note = 2'-O-methylguanosine-3'-phosphate
  modified_base 5: mod_base = OTHER; note = 2'-O-methyladenosine-3'-phosphate
  modified_base 6: mod_base = OTHER; note = 2'-O-methyladenosine-3'-phosphate
  modified_base 7: mod_base = OTHER; note = 2'-deoxy-2'-fluorouridine-3'-phosphate
  modified_base 8: mod_base = OTHER; note = 2'-O-methyladenosine-3'-phosphate
  modified_base 9: mod_base = OTHER; note = 2'-deoxy-2'-fluorouridine-3'-phosphate
  modified_base 10: mod_base = OTHER; note = 2'-deoxy-2'-fluorouridine-3'-phosphate
  modified_base 11: mod_base = OTHER; note = 2'-deoxy-2'-fluorocytidine-3'-phosphate
  modified_base 12: mod_base = OTHER; note = 2'-O-methyluridine-3'-phosphate
  modified_base 13: mod_base = OTHER; note = 2'-O-methyluridine-3'-phosphate
  modified_base 14: mod_base = OTHER; note = 2'-O-methylcytidine-3'-phosphate
  modified_base 15: mod_base = OTHER; note = 2'-O-methyladenosine-3'-phosphate
  modified_base 16: mod_base = OTHER; note = 2'-O-methyladenosine-3'-phosphate
  modified_base 17: mod_base = OTHER; note = 2'-O-methyladenosine-3'-phosphate
  modified_base 18: mod_base = OTHER; note = 2'-O-methylguanosine-3'-phosphate
  modified_base 19: mod_base = OTHER; note = 2'-O-methyladenosine-3'-phosphate
  modified_base 20: mod_base = OTHER; note = 2'-O-methylguanosine-3'-phosphate
  modified_base 21: mod_base = OTHER; note = 2'-O-methyladenosine-3'-phosphate ((2S,4R)-1-[29-[[2-(acetylamino)-2-deoxy-beta-D-galactopyra nosyl]oxy]-14,14-bis[[3-[[3-[[5-[[2-(acetylamino)-2-deoxy-b eta-D-galactopyranosyl]oxy]-1-oxopentyl]amino]propyl]amino] -3-oxopropoxy]methyl]-1,12,19,25-tetraoxo-16-oxa-13,20,24-t riazanonacos-1-yl]-4-hydroxy-2-pyrrolidinyl)methyl ester
cttgaatattcttcaaagaga

SEQ ID NO: 33 - RNA, 23 nt, synthetic construct
  source 1..23: mol_type = other RNA
  modified_base 1: mod_base = OTHER; note = 2'-O-methyluridine-3'-phosphorothioate 5'-(E)-Vinylphosphonate
  modified_base 2: mod_base = OTHER; note = 2'-deoxy-2'-fluorocytidine-3'-phosphorothioate
  modified_base 3: mod_base = OTHER; note = 2'-O-methyluridine-3'-phosphate
  modified_base 4: mod_base = OTHER; note = 2'-O-methylcytidine-3'-phosphate
  modified_base 5: mod_base = OTHER; note = 2'-O-methyluridine-3'-phosphate
  modified_base 6: mod_base = OTHER; note = 2'-deoxy-2'-fluorouridine-3'-phosphate
  modified_base 7: mod_base = OTHER; note = 2'-O-methyluridine-3'-phosphate
  modified_base 8: mod_base = OTHER; note = 2'-deoxy-2'-fluoroguanosine-3'-phosphate
  modified_base 9: mod_base = OTHER; note = 2'-deoxy-2'-fluoroadenosine-3'-phosphate
  modified_base 10: mod_base = OTHER; note = 2'-O-methyladenosine-3'-phosphate
  modified_base 11: mod_base = OTHER; note = 2'-O-methylguanosine-3'-phosphate
  modified_base 12: mod_base = OTHER; note = 2'-O-methyladenosine-3'-phosphate
  modified_base 13: mod_base = OTHER; note = 2'-O-methyladenosine-3'-phosphate
  modified_base 14: mod_base = OTHER; note = 2'-deoxy-2'-fluorouridine-3'-phosphate
  modified_base 15: mod_base = OTHER; note = 2'-O-methyladenosine-3'-phosphate
  modified_base 16: mod_base = OTHER; note = 2'-deoxy-2'-fluorouridine-3'-phosphate
  modified_base 17: mod_base = OTHER; note = 2'-O-methyluridine-3'-phosphate
  modified_base 18: mod_base = OTHER; note = 2'-O-methylcytidine-3'-phosphate
  modified_base 19: mod_base = OTHER; note = 2'-O-methyladenosine-3'-phosphate
  modified_base 20: mod_base = OTHER; note = 2'-O-methyladenosine-3'-phosphate
  modified_base 21: mod_base = OTHER; note = 2'-O-methylguanosine-3'-phosphorothioate
  modified_base 22: mod_base = OTHER; note = 2'-O-methyluridine-3'-phosphorothioate
  modified_base 23: mod_base = OTHER; note = 2'-O-methyluridine
tctctttgaagaatattcaagtt

SEQ ID NO: 34 - RNA, 23 nt, synthetic construct
  source 1..23: mol_type = other RNA
aacttgaatattcttcaaagaga

SEQ ID NO: 35 - RNA, 21 nt, synthetic construct
  source 1..21: mol_type = other RNA
  modified_base 1: mod_base = OTHER; note = 2'-O-methyladenosine-3'-phosphorothioate
  modified_base 2: mod_base = OTHER; note = 2'-O-methylcytidine-3'-phosphorothioate
  modified_base 3: mod_base = OTHER; note = 2'-O-methyluridine-3'-phosphate
  modified_base 4: mod_base = OTHER; note = 2'-O-methylcytidine-3'-phosphate
  modified_base 5: mod_base = OTHER; note = 2'-O-methyluridine-3'-phosphate
  modified_base 6: mod_base = OTHER; note = 2'-O-methyladenosine-3'-phosphate
  modified_base 7: mod_base = OTHER; note = 2'-deoxy-2'-fluoroadenosine-3'-phosphate
  modified_base 8: mod_base = OTHER; note = 2'-O-methyluridine-3'-phosphate
  modified_base 9: mod_base = OTHER; note = 2'-deoxy-2'-fluorocytidine-3'-phosphate
  modified_base 10: mod_base = OTHER; note = 2'-deoxy-2'-fluoroadenosine-3'-phosphate
  modified_base 11: mod_base = OTHER; note = 2'-deoxy-2'-fluoroguanosine-3'-phosphate
  modified_base 12: mod_base = OTHER; note = 2'-O-methyladenosine-3'-phosphate
  modified_base 13: mod_base = OTHER; note = 2'-O-methylguanosine-3'-phosphate
  modified_base 14: mod_base = OTHER; note = 2'-O-methylguanosine-3'-phosphate
  modified_base 15: mod_base = OTHER; note = 2'-O-methyladenosine-3'-phosphate
  modified_base 16: mod_base = OTHER; note = 2'-O-methyladenosine-3'-phosphate
  modified_base 17: mod_base = OTHER; note = 2'-O-methylguanosine-3'-phosphate
  modified_base 18: mod_base = OTHER; note = 2'-O-methyladenosine-3'-phosphate
  modified_base 19: mod_base = OTHER; note = 2'-O-methyladenosine-3'-phosphate
  modified_base 20: mod_base = OTHER; note = 2'-O-methyladenosine-3'-phosphate
  modified_base 21: mod_base = OTHER; note = 2'-O-methyladenosine-3'-phosphate ((2S,4R)-1-[29-[[2-(acetylamino)-2-deoxy-beta-D-galactopyra nosyl]oxy]-14,14-bis[[3-[[3-[[5-[[2-(acetylamino)-2-deoxy-b eta-D-galactopyranosyl]oxy]-1-oxopentyl]amino]propyl]amino] -3-oxopropoxy]methyl]-1,12,19,25-tetraoxo-16-oxa-13,20,24-t riazanonacos-1-yl]-4-hydroxy-2-pyrrolidinyl)methyl ester
actctaatcagaggaagaaaa

SEQ ID NO: 36 - RNA, 23 nt, synthetic construct
  source 1..23: mol_type = other RNA
  modified_base 1: mod_base = OTHER; note = 2'-O-methyluridine-3'-phosphorothioate 5'-(E)-Vinylphosphonate
  modified_base 2: mod_base = OTHER; note = 2'-deoxy-2'-fluorouridine-3'-phosphorothioate
  modified_base 3: mod_base = OTHER; note = 2'-O-methyluridine-3'-phosphate
  modified_base 4: mod_base = OTHER; note = 2'-O-methyluridine-3'-phosphate
  modified_base 5: mod_base = OTHER; note = 2'-O-methylcytidine-3'-phosphate
  modified_base 6: mod_base = OTHER; note = 2'-deoxy-2'-fluorouridine-3'-phosphate
  modified_base 7: mod_base = OTHER; note = 2'-O-methyluridine-3'-phosphate
  modified_base 8: mod_base = OTHER; note = 2'-deoxy-2'-fluorocytidine-3'-phosphate
  modified_base 9: mod_base = OTHER; note = 2'-deoxy-2'-fluorocytidine-3'-phosphate
  modified_base 10: mod_base = OTHER; note = 2'-O-methyluridine-3'-phosphate
  modified_base 11: mod_base = OTHER; note = 2'-O-methylcytidine-3'-phosphate
  modified_base 12: mod_base = OTHER; note = 2'-O-methyluridine-3'-phosphate
  modified_base 13: mod_base = OTHER; note = 2'-O-methylguanosine-3'-phosphate
  modified_base 14: mod_base = OTHER; note = 2'-deoxy-2'-fluoroadenosine-3'-phosphate
  modified_base 15: mod_base = OTHER; note = 2'-O-methyluridine-3'-phosphate
  modified_base 16: mod_base = OTHER; note = 2'-deoxy-2'-fluorouridine-3'-phosphate
  modified_base 17: mod_base = OTHER; note = 2'-O-methyladenosine-3'-phosphate
  modified_base 18: mod_base = OTHER; note = 2'-O-methylguanosine-3'-phosphate
  modified_base 19: mod_base = OTHER; note = 2'-O-methyladenosine-3'-phosphate
  modified_base 20: mod_base = OTHER; note = 2'-O-methylguanosine-3'-phosphate
  modified_base 21: mod_base = OTHER; note = 2'-O-methyluridine-3'-phosphorothioate
  modified_base 22: mod_base = OTHER; note = 2'-O-methyluridine-3'-phosphorothioate
  modified_base 23: mod_base = OTHER; note = 2'-O-methylguanosine
ttttcttcctctgattagagttg

SEQ ID NO: 37 - RNA, 23 nt, synthetic construct
  source 1..23: mol_type = other RNA
caactctaatcagaggaagaaac

SEQ ID NO: 38 - RNA, 21 nt, synthetic construct
  source 1..21: mol_type = other RNA
  modified_base 1: mod_base = OTHER; note = 2'-O-methylguanosine-3'-phosphorothioate
  modified_base 2: mod_base = OTHER; note = 2'-O-methyladenosine-3'-phosphorothioate
  modified_base 3: mod_base = OTHER; note = 2'-O-methyladenosine-3'-phosphate
  modified_base 4: mod_base = OTHER; note = 2'-O-methylguanosine-3'-phosphate
  modified_base 5: mod_base = OTHER; note = 2'-O-methyluridine-3'-phosphate
  modified_base 6: mod_base = OTHER; note = 2'-O-methyladenosine-3'-phosphate
  modified_base 7: mod_base = OTHER; note = 2'-deoxy-2'-fluoroadenosine-3'-phosphate
  modified_base 8: mod_base = OTHER; note = 2'-O-methyladenosine-3'-phosphate
  modified_base 9: mod_base = OTHER; note = 2'-deoxy-2'-fluoroadenosine-3'-phosphate
  modified_base 10: mod_base = OTHER; note = 2'-deoxy-2'-fluorocytidine-3'-phosphate
  modified_base 11: mod_base = OTHER; note = 2'-deoxy-2'-fluorocytidine-3'-phosphate
  modified_base 12: mod_base = OTHER; note = 2'-O-methyladenosine-3'-phosphate
  modified_base 13: mod_base = OTHER; note = 2'-O-methylguanosine-3'-phosphate
  modified_base 14: mod_base = OTHER; note = 2'-O-methyladenosine-3'-phosphate
  modified_base 15: mod_base = OTHER; note = 2'-O-methyluridine-3'-phosphate
  modified_base 16: mod_base = OTHER; note = 2'-O-methylguanosine-3'-phosphate
  modified_base 17: mod_base = OTHER; note = 2'-O-methyluridine-3'-phosphate
  modified_base 18: mod_base = OTHER; note = 2'-O-methyluridine-3'-phosphate
  modified_base 19: mod_base = OTHER; note = 2'-O-methyluridine-3'-phosphate
  modified_base 20: mod_base = OTHER; note = 2'-O-methyluridine-3'-phosphate
  modified_base 21: mod_base = OTHER; note = 2'-O-methyladenosine-3'-phosphate ((2S,4R)-1-[29-[[2-(acetylamino)-2-deoxy-beta-D-galactopyra nosyl]oxy]-14,14-bis[[3-[[3-[[5-[[2-(acetylamino)-2-deoxy-b eta-D-galactopyranosyl]oxy]-1-oxopentyl]amino]propyl]amino] -3-oxopropoxy]methyl]-1,12,19,25-tetraoxo-16-oxa-13,20,24-t riazanonacos-1-yl]-4-hydroxy-2-pyrrolidinyl)methyl ester
gaagtaaaaccagatgtttta

SEQ ID NO: 39 - RNA, 23 nt, synthetic construct
  source 1..23: mol_type = other RNA
  modified_base 1: mod_base = OTHER; note = 2'-O-methyluridine-3'-phosphorothioate 5'-(E)-Vinylphosphonate
  modified_base 2: mod_base = OTHER; note = 2'-deoxy-2'-fluoroadenosine-3'-phosphorothioate
  modified_base 3: mod_base = OTHER; note = 2'-O-methyladenosine-3'-phosphate
  modified_base 4: mod_base = OTHER; note = 2'-O-methyladenosine-3'-phosphate
  modified_base 5: mod_base = OTHER; note = 2'-O-methyladenosine-3'-phosphate
  modified_base 6: mod_base = OTHER; note = 2'-deoxy-2'-fluorocytidine-3'-phosphate
  modified_base 7: mod_base = OTHER; note = 2'-O-methyladenosine-3'-phosphate
  modified_base 8: mod_base = OTHER; note = 2'-deoxy-2'-fluorouridine-3'-phosphate
  modified_base 9: mod_base = OTHER; note = 2'-deoxy-2'-fluorocytidine-3'-phosphate
  modified_base 10: mod_base = OTHER; note = 2'-O-methyluridine-3'-phosphate
  modified_base 11: mod_base = OTHER; note = 2'-O-methylguanosine-3'-phosphate
  modified_base 12: mod_base = OTHER; note = 2'-O-methylguanosine-3'-phosphate
  modified_base 13: mod_base = OTHER; note = 2'-O-methyluridine-3'-phosphate
  modified_base 14: mod_base = OTHER; note = 2'-deoxy-2'-fluorouridine-3'-phosphate
  modified_base 15: mod_base = OTHER; note = 2'-O-methyluridine-3'-phosphate
  modified_base 16: mod_base = OTHER; note = 2'-deoxy-2'-fluorouridine-3'-phosphate
  modified_base 17: mod_base = OTHER; note = 2'-O-methyladenosine-3'-phosphate
  modified_base 18: mod_base = OTHER; note = 2'-O-methylcytidine-3'-phosphate
  modified_base 19: mod_base = OTHER; note = 2'-O-methyluridine-3'-phosphate
  modified_base 20: mod_base = OTHER; note = 2'-O-methyluridine-3'-phosphate
  modified_base 21: mod_base = OTHER; note = 2'-O-methylcytidine-3'-phosphorothioate
  modified_base 22: mod_base = OTHER; note = 2'-O-methylcytidine-3'-phosphorothioate
  modified_base 23: mod_base = OTHER; note = 2'-O-methyluridine
taaaacatctggttttacttcct

SEQ ID NO: 40 - RNA, 23 nt, synthetic construct
  source 1..23: mol_type = other RNA
aggaagtaaaaccagatgttttc

SEQ ID NO: 41 - RNA, 21 nt, synthetic construct
  source 1..21: mol_type = other RNA
  modified_base 1: mod_base = OTHER; note = 2'-O-methylguanosine-3'-phosphorothioate
  modified_base 2: mod_base = OTHER; note = 2'-O-methyluridine-3'-phosphorothioate
  modified_base 3: mod_base = OTHER; note = 2'-O-methyladenosine-3'-phosphate
  modified_base 4: mod_base = OTHER; note = 2'-O-methyladenosine-3'-phosphate
  modified_base 5: mod_base = OTHER; note = 2'-O-methyladenosine-3'-phosphate
  modified_base 6: mod_base = OTHER; note = 2'-O-methyladenosine-3'-phosphate
  modified_base 7: mod_base = OTHER; note = 2'-deoxy-2'-fluorocytidine-3'-phosphate
  modified_base 8: mod_base = OTHER; note = 2'-O-methylcytidine-3'-phosphate
  modified_base 9: mod_base = OTHER; note = 2'-deoxy-2'-fluoroadenosine-3'-phosphate
  modified_base 10: mod_base = OTHER; note = 2'-deoxy-2'-fluoroguanosine-3'-phosphate
  modified_base 11: mod_base = OTHER; note = 2'-deoxy-2'-fluoroadenosine-3'-phosphate
  modified_base 12: mod_base = OTHER; note = 2'-O-methyluridine-3'-phosphate
  modified_base 13: mod_base = OTHER; note = 2'-O-methylguanosine-3'-phosphate
  modified_base 14: mod_base = OTHER; note = 2'-O-methyluridine-3'-phosphate
  modified_base 15: mod_base = OTHER; note = 2'-O-methyluridine-3'-phosphate
  modified_base 16: mod_base = OTHER; note = 2'-O-methyluridine-3'-phosphate
  modified_base 17: mod_base = OTHER; note = 2'-O-methyluridine-3'-phosphate
  modified_base 18: mod_base = OTHER; note = 2'-O-methylcytidine-3'-phosphate
  modified_base 19: mod_base = OTHER; note = 2'-O-methylcytidine-3'-phosphate
  modified_base 20: mod_base = OTHER; note = 2'-O-methyladenosine-3'-phosphate
  modified_base 21: mod_base = OTHER; note = 2'-O-methyladenosine-3'-phosphate ((2S,4R)-1-[29-[[2-(acetylamino)-2-deoxy-beta-D-galactopyra nosyl]oxy]-14,14-bis[[3-[[3-[[5-[[2-(acetylamino)-2-deoxy-b eta-D-galactopyranosyl]oxy]-1-oxopentyl]amino]propyl]amino] -3-oxopropoxy]methyl]-1,12,19,25-tetraoxo-16-oxa-13,20,24-t riazanonacos-1-yl]-4-hydroxy-2-pyrrolidinyl)methyl ester
gtaaaaccagatgttttccaa

SEQ ID NO: 42 - RNA, 23 nt, synthetic construct
  source 1..23: mol_type = other RNA
  modified_base 1: mod_base = OTHER; note = 2'-O-methyluridine-3'-phosphorothioate 5'-(E)-Vinylphosphonate
  modified_base 2: mod_base = OTHER; note = 2'-deoxy-2'-fluorouridine-3'-phosphorothioate
  modified_base 3: mod_base = OTHER; note = 2'-O-methylguanosine-3'-phosphate
  modified_base 4: mod_base = OTHER; note = 2'-O-methylguanosine-3'-phosphate
  modified_base 5: mod_base = OTHER; note = 2'-O-methyladenosine-3'-phosphate
  modified_base 6: mod_base = OTHER; note = 2'-deoxy-2'-fluoroadenosine-3'-phosphate
  modified_base 7: mod_base = OTHER; note = 2'-O-methyladenosine-3'-phosphate
  modified_base 8: mod_base = OTHER; note = 2'-deoxy-2'-fluoroadenosine-3'-phosphate
  modified_base 9: mod_base = OTHER; note = 2'-deoxy-2'-fluorocytidine-3'-phosphate
  modified_base 10: mod_base = OTHER; note = 2'-O-methyladenosine-3'-phosphate
  modified_base 11: mod_base = OTHER; note = 2'-O-methyluridine-3'-phosphate
  modified_base 12: mod_base = OTHER; note = 2'-O-methylcytidine-3'-phosphate
  modified_base 13: mod_base = OTHER; note = 2'-O-methyluridine-3'-phosphate
  modified_base 14: mod_base = OTHER; note = 2'-deoxy-2'-fluoroguanosine-3'-phosphate
  modified_base 15: mod_base = OTHER; note = 2'-O-methylguanosine-3'-phosphate
  modified_base 16: mod_base = OTHER; note = 2'-deoxy-2'-fluorouridine-3'-phosphate
  modified_base 17: mod_base = OTHER; note = 2'-O-methyluridine-3'-phosphate
  modified_base 18: mod_base = OTHER; note = 2'-O-methyluridine-3'-phosphate
  modified_base 19: mod_base = OTHER; note = 2'-O-methyluridine-3'-phosphate
  modified_base 20: mod_base = OTHER; note = 2'-O-methyladenosine-3'-phosphate
  modified_base 21: mod_base = OTHER; note = 2'-O-methylcytidine-3'-phosphorothioate
  modified_base 22: mod_base = OTHER; note = 2'-O-methyluridine-3'-phosphorothioate
  modified_base 23: mod_base = OTHER; note = 2'-O-methyluridine
ttggaaaacatctggttttactt

SEQ ID NO: 43 - RNA, 23 nt, synthetic construct
  source 1..23: mol_type = other RNA
aagtaaaaccagatgttttccac

SEQ ID NO: 44 - RNA, 21 nt, synthetic construct
  source 1..21: mol_type = other RNA
  modified_base 1: mod_base = OTHER; note = 2'-O-methyladenosine-3'-phosphorothioate
  modified_base 2: mod_base = OTHER; note = 2'-O-methyladenosine-3'-phosphorothioate
  modified_base 3: mod_base = OTHER; note = 2'-O-methyladenosine-3'-phosphate
  modified_base 4: mod_base = OTHER; note = 2'-O-methyladenosine-3'-phosphate
  modified_base 5: mod_base = OTHER; note = 2'-O-methylcytidine-3'-phosphate
  modified_base 6: mod_base = OTHER; note = 2'-O-methylcytidine-3'-phosphate
  modified_base 7: mod_base = OTHER; note = 2'-deoxy-2'-fluoroadenosine-3'-phosphate
  modified_base 8: mod_base = OTHER; note = 2'-O-methylguanosine-3'-phosphate
  modified_base 9: mod_base = OTHER; note = 2'-deoxy-2'-fluoroadenosine-3'-phosphate
  modified_base 10: mod_base = OTHER; note = 2'-deoxy-2'-fluorouridine-3'-phosphate
  modified_base 11: mod_base = OTHER; note = 2'-deoxy-2'-fluoroguanosine-3'-phosphate
  modified_base 12: mod_base = OTHER; note = 2'-O-methyluridine-3'-phosphate
  modified_base 13: mod_base = OTHER; note = 2'-O-methyluridine-3'-phosphate
  modified_base 14: mod_base = OTHER; note = 2'-O-methyluridine-3'-phosphate
  modified_base 15: mod_base = OTHER; note = 2'-O-methyluridine-3'-phosphate
  modified_base 16: mod_base = OTHER; note = 2'-O-methylcytidine-3'-phosphate
  modified_base 17: mod_base = OTHER; note = 2'-O-methylcytidine-3'-phosphate
  modified_base 18: mod_base = OTHER; note = 2'-O-methyladenosine-3'-phosphate
  modified_base 19: mod_base = OTHER; note = 2'-O-methylcytidine-3'-phosphate
  modified_base 20: mod_base = OTHER; note = 2'-O-methylcytidine-3'-phosphate
  modified_base 21: mod_base = OTHER; note = 2'-O-methyladenosine-3'-phosphate ((2S,4R)-1-[29-[[2-(acetylamino)-2-deoxy-beta-D-galactopyra nosyl]oxy]-14,14-bis[[3-[[3-[[5-[[2-(acetylamino)-2-deoxy-b eta-D-galactopyranosyl]oxy]-1-oxopentyl]amino]propyl]amino] -3-oxopropoxy]methyl]-1,12,19,25-tetraoxo-16-oxa-13,20,24-t riazanonacos-1-yl]-4-hydroxy-2-pyrrolidinyl)methyl ester
aaaaccagatgttttccacca

SEQ ID NO: 45 - RNA, 23 nt, synthetic construct
  source 1..23: mol_type = other RNA
  modified_base 1: mod_base = OTHER; note = 2'-O-methyluridine-3'-phosphorothioate 5'-(E)-Vinylphosphonate
  modified_base 2: mod_base = OTHER; note = 2'-deoxy-2'-fluoroguanosine-3'-phosphorothioate
  modified_base 3: mod_base = OTHER; note = 2'-O-methylguanosine-3'-phosphate
  modified_base 4: mod_base = OTHER; note = 2'-O-methyluridine-3'-phosphate
  modified_base 5: mod_base = OTHER; note = 2'-O-methylguanosine-3'-phosphate
  modified_base 6: mod_base = OTHER; note = 2'-deoxy-2'-fluoroguanosine-3'-phosphate
  modified_base 7: mod_base = OTHER; note = 2'-O-methyladenosine-3'-phosphate
  modified_base 8: mod_base = OTHER; note = 2'-deoxy-2'-fluoroadenosine-3'-phosphate
  modified_base 9: mod_base = OTHER; note = 2'-deoxy-2'-fluoroadenosine-3'-phosphate
  modified_base 10: mod_base = OTHER; note = 2'-O-methyladenosine-3'-phosphate
  modified_base 11: mod_base = OTHER; note = 2'-O-methylcytidine-3'-phosphate
  modified_base 12: mod_base = OTHER; note = 2'-O-methyladenosine-3'-phosphate
  modified_base 13: mod_base = OTHER; note = 2'-O-methyluridine-3'-phosphate
  modified_base 14: mod_base = OTHER; note = 2'-deoxy-2'-fluorocytidine-3'-phosphate
  modified_base 15: mod_base = OTHER; note = 2'-O-methyluridine-3'-phosphate
  modified_base 16: mod_base = OTHER; note = 2'-deoxy-2'-fluoroguanosine-3'-phosphate
  modified_base 17: mod_base = OTHER; note = 2'-O-methylguanosine-3'-phosphate
  modified_base 18: mod_base = OTHER; note = 2'-O-methyluridine-3'-phosphate
  modified_base 19: mod_base = OTHER; note = 2'-O-methyluridine-3'-phosphate
  modified_base 20: mod_base = OTHER; note = 2'-O-methyluridine-3'-phosphate
  modified_base 21: mod_base = OTHER; note = 2'-O-methyluridine-3'-phosphorothioate
  modified_base 22: mod_base = OTHER; note = 2'-O-methyladenosine-3'-phosphorothioate
  modified_base 23: mod_base = OTHER; note = 2'-O-methylcytidine
tggtggaaaacatctggttttac

SEQ ID NO: 46 - RNA, 23 nt, synthetic construct
  source 1..23: mol_type = other RNA
gtaaaaccagatgttttccacca

SEQ ID NO: 47 - RNA, 21 nt, synthetic construct
  source 1..21: mol_type = other RNA
  modified_base 1: mod_base = OTHER; note = 2'-O-methyladenosine-3'-phosphorothioate
  modified_base 2: mod_base = OTHER; note = 2'-O-methyladenosine-3'-phosphorothioate
  modified_base 3: mod_base = OTHER; note = 2'-O-methyladenosine-3'-phosphate
  modified_base 4: mod_base = OTHER; note = 2'-O-methylcytidine-3'-phosphate
  modified_base 5: mod_base = OTHER; note = 2'-O-methylcytidine-3'-phosphate
  modified_base 6: mod_base = OTHER; note = 2'-O-methyladenosine-3'-phosphate
  modified_base 7: mod_base = OTHER; note = 2'-deoxy-2'-fluoroguanosine-3'-phosphate
  modified_base 8: mod_base = OTHER; note = 2'-O-methyladenosine-3'-phosphate
  modified_base 9: mod_base = OTHER; note = 2'-deoxy-2'-fluorouridine-3'-phosphate
  modified_base 10: mod_base = OTHER; note = 2'-deoxy-2'-fluoroguanosine-3'-phosphate
  modified_base 11: mod_base = OTHER; note = 2'-deoxy-2'-fluorouridine-3'-phosphate
  modified_base 12: mod_base = OTHER; note = 2'-O-methyluridine-3'-phosphate
  modified_base 13: mod_base = OTHER; note = 2'-O-methyluridine-3'-phosphate
  modified_base 14: mod_base = OTHER; note = 2'-O-methyluridine-3'-phosphate
  modified_base 15: mod_base = OTHER; note = 2'-O-methylcytidine-3'-phosphate
  modified_base 16: mod_base = OTHER; note = 2'-O-methylcytidine-3'-phosphate
  modified_base 17: mod_base = OTHER; note = 2'-O-methyladenosine-3'-phosphate
  modified_base 18: mod_base = OTHER; note = 2'-O-methylcytidine-3'-phosphate
  modified_base 19: mod_base = OTHER; note = 2'-O-methylcytidine-3'-phosphate
  modified_base 20: mod_base = OTHER; note = 2'-O-methyladenosine-3'-phosphate
  modified_base 21: mod_base = OTHER; note = 2'-O-methyladenosine-3'-phosphate ((2S,4R)-1-[29-[[2-(acetylamino)-2-deoxy-beta-D-galactopyra nosyl]oxy]-14,14-bis[[3-[[3-[[5-[[2-(acetylamino)-2-deoxy-b eta-D-galactopyranosyl]oxy]-1-oxopentyl]amino]propyl]amino] -3-oxopropoxy]methyl]-1,12,19,25-tetraoxo-16-oxa-13,20,24-t riazanonacos-1-yl]-4-hydroxy-2-pyrrolidinyl)methyl ester
aaaccagatgttttccaccaa

SEQ ID NO: 48 - RNA, 23 nt, synthetic construct
  source 1..23: mol_type = other RNA
  modified_base 1: mod_base = OTHER; note = 2'-O-methyluridine-3'-phosphorothioate 5'-(E)-Vinylphosphonate
  modified_base 2: mod_base = OTHER; note = 2'-deoxy-2'-fluorouridine-3'-phosphorothioate
  modified_base 3: mod_base = OTHER; note = 2'-O-methylguanosine-3'-phosphate
  modified_base 4: mod_base = OTHER; note = 2'-O-methylguanosine-3'-phosphate
  modified_base 5: mod_base = OTHER; note = 2'-O-methyluridine-3'-phosphate
  modified_base 6: mod_base = OTHER; note = 2'-deoxy-2'-fluoroguanosine-3'-phosphate
  modified_base 7: mod_base = OTHER; note = 2'-O-methylguanosine-3'-phosphate
  modified_base 8: mod_base = OTHER; note = 2'-deoxy-2'-fluoroadenosine-3'-phosphate
  modified_base 9: mod_base = OTHER; note = 2'-deoxy-2'-fluoroadenosine-3'-phosphate
  modified_base 10: mod_base = OTHER; note = 2'-O-methyladenosine-3'-phosphate
  modified_base 11: mod_base = OTHER; note = 2'-O-methyladenosine-3'-phosphate
  modified_base 12: mod_base = OTHER; note = 2'-O-methylcytidine-3'-phosphate
  modified_base 13: mod_base = OTHER; note = 2'-O-methyladenosine-3'-phosphate
  modified_base 14: mod_base = OTHER; note = 2'-deoxy-2'-fluorouridine-3'-phosphate
  modified_base 15: mod_base = OTHER; note = 2'-O-methylcytidine-3'-phosphate
  modified_base 16: mod_base = OTHER; note = 2'-deoxy-2'-fluorouridine-3'-phosphate
  modified_base 17: mod_base = OTHER; note = 2'-O-methylguanosine-3'-phosphate
  modified_base 18: mod_base = OTHER; note = 2'-O-methylguanosine-3'-phosphate
  modified_base 19: mod_base = OTHER; note = 2'-O-methyluridine-3'-phosphate
  modified_base 20: mod_base = OTHER; note = 2'-O-methyluridine-3'-phosphate
  modified_base 21: mod_base = OTHER; note = 2'-O-methyluridine-3'-phosphorothioate
  modified_base 22: mod_base = OTHER; note = 2'-O-methyluridine-3'-phosphorothioate
  modified_base 23: mod_base = OTHER; note = 2'-O-methyladenosine
ttggtggaaaacatctggtttta

SEQ ID NO: 49 - RNA, 23 nt, synthetic construct
  source 1..23: mol_type = other RNA
taaaaccagatgttttccaccaa

SEQ ID NO: 50 - RNA, 21 nt, synthetic construct
  source 1..21: mol_type = other RNA
  modified_base 1: mod_base = OTHER; note = 2'-O-methyladenosine-3'-phosphorothioate
  modified_base 2: mod_base = OTHER; note = 2'-O-methyladenosine-3'-phosphorothioate
  modified_base 3: mod_base = OTHER; note = 2'-O-methylcytidine-3'-phosphate
  modified_base 4: mod_base = OTHER; note = 2'-O-methylcytidine-3'-phosphate
  modified_base 5: mod_base = OTHER; note = 2'-O-methyladenosine-3'-phosphate
  modified_base 6: mod_base = OTHER; note = 2'-O-methylguanosine-3'-phosphate
  modified_base 7: mod_base = OTHER; note = 2'-deoxy-2'-fluoroadenosine-3'-phosphate
  modified_base 8: mod_base = OTHER; note = 2'-O-methyluridine-3'-phosphate
  modified_base 9: mod_base = OTHER; note = 2'-deoxy-2'-fluoroguanosine-3'-phosphate
  modified_base 10: mod_base = OTHER; note = 2'-deoxy-2'-fluorouridine-3'-phosphate
  modified_base 11: mod_base = OTHER; note = 2'-deoxy-2'-fluorouridine-3'-phosphate
  modified_base 12: mod_base = OTHER; note = 2'-O-methyluridine-3'-phosphate
  modified_base 13: mod_base = OTHER; note = 2'-O-methyluridine-3'-phosphate
  modified_base 14: mod_base = OTHER; note = 2'-O-methylcytidine-3'-phosphate
  modified_base 15: mod_base = OTHER; note = 2'-O-methylcytidine-3'-phosphate
  modified_base 16: mod_base = OTHER; note = 2'-O-methyladenosine-3'-phosphate
  modified_base 17: mod_base = OTHER; note = 2'-O-methylcytidine-3'-phosphate
  modified_base 18: mod_base = OTHER; note = 2'-O-methylcytidine-3'-phosphate
  modified_base 19: mod_base = OTHER; note = 2'-O-methyladenosine-3'-phosphate
  modified_base 20: mod_base = OTHER; note = 2'-O-methyladenosine-3'-phosphate
  modified_base 21: mod_base = OTHER; note = 2'-O-methyladenosine-3'-phosphate ((2S,4R)-1-[29-[[2-(acetylamino)-2-deoxy-beta-D-galactopyra nosyl]oxy]-14,14-bis[[3-[[3-[[5-[[2-(acetylamino)-2-deoxy-b eta-D-galactopyranosyl]oxy]-1-oxopentyl]amino]propyl]amino] -3-oxopropoxy]methyl]-1,12,19,25-tetraoxo-16-oxa-13,20,24-t riazanonacos-1-yl]-4-hydroxy-2-pyrrolidinyl)methyl ester
aaccagatgttttccaccaaa

SEQ ID NO: 51 - RNA, 23 nt, synthetic construct
  source 1..23: mol_type = other RNA
  modified_base 1: mod_base = OTHER; note = 2'-O-methyluridine-3'-phosphorothioate 5'-(E)-Vinylphosphonate
  modified_base 2: mod_base = OTHER; note = 2'-deoxy-2'-fluorouridine-3'-phosphorothioate
  modified_base 3: mod_base = OTHER; note = 2'-O-methyluridine-3'-phosphate
  modified_base 4: mod_base = OTHER; note = 2'-O-methylguanosine-3'-phosphate
  modified_base 5: mod_base = OTHER; note = 2'-O-methylguanosine-3'-phosphate
  modified_base 6: mod_base = OTHER; note = 2'-deoxy-2'-fluorouridine-3'-phosphate
  modified_base 7: mod_base = OTHER; note = 2'-O-methylguanosine-3'-phosphate
  modified_base 8: mod_base = OTHER; note = 2'-deoxy-2'-fluoroguanosine-3'-phosphate
  modified_base 9: mod_base = OTHER; note = 2'-deoxy-2'-fluoroadenosine-3'-phosphate
  modified_base 10: mod_base = OTHER; note = 2'-O-methyladenosine-3'-phosphate
  modified_base 11: mod_base = OTHER; note = 2'-O-methyladenosine-3'-phosphate
  modified_base 12: mod_base = OTHER; note = 2'-O-methyladenosine-3'-phosphate
  modified_base 13: mod_base = OTHER; note = 2'-O-methylcytidine-3'-phosphate
  modified_base 14: mod_base = OTHER; note = 2'-deoxy-2'-fluoroadenosine-3'-phosphate
  modified_base 15: mod_base = OTHER; note = 2'-O-methyluridine-3'-phosphate
  modified_base 16: mod_base = OTHER; note = 2'-deoxy-2'-fluorocytidine-3'-phosphate
  modified_base 17: mod_base = OTHER; note = 2'-O-methyluridine-3'-phosphate
  modified_base 18: mod_base = OTHER; note = 2'-O-methylguanosine-3'-phosphate
  modified_base 19: mod_base = OTHER; note = 2'-O-methylguanosine-3'-phosphate
  modified_base 20: mod_base = OTHER; note = 2'-O-methyluridine-3'-phosphate
  modified_base 21: mod_base = OTHER; note = 2'-O-methyluridine-3'-phosphorothioate
  modified_base 22: mod_base = OTHER; note = 2'-O-methyluridine-3'-phosphorothioate
  modified_base 23: mod_base = OTHER; note = 2'-O-methyluridine
tttggtggaaaacatctggtttt

SEQ ID NO: 52 - RNA, 23 nt, synthetic construct
  source 1..23: mol_type = other RNA
aaaaccagatgttttccaccaaa

SEQ ID NO: 53 - RNA, 21 nt, synthetic construct
  source 1..21: mol_type = other RNA
  modified_base 1: mod_base = OTHER; note = 2'-O-methyladenosine-3'-phosphorothioate
  modified_base 2: mod_base = OTHER; note = 2'-O-methylcytidine-3'-phosphorothioate
  modified_base 3: mod_base = OTHER; note = 2'-O-methylcytidine-3'-phosphate
  modified_base 4: mod_base = OTHER; note = 2'-O-methyladenosine-3'-phosphate
  modified_base 5: mod_base = OTHER; note = 2'-O-methylguanosine-3'-phosphate
  modified_base 6: mod_base = OTHER; note = 2'-O-methyladenosine-3'-phosphate
  modified_base 7: mod_base = OTHER; note = 2'-deoxy-2'-fluorouridine-3'-phosphate
  modified_base 8: mod_base = OTHER; note = 2'-O-methylguanosine-3'-phosphate
  modified_base 9: mod_base = OTHER; note = 2'-deoxy-2'-fluorouridine-3'-phosphate
  modified_base 10: mod_base = OTHER; note = 2'-deoxy-2'-fluorouridine-3'-phosphate
  modified_base 11: mod_base = OTHER; note = 2'-deoxy-2'-fluorouridine-3'-phosphate
  modified_base 12: mod_base = OTHER; note = 2'-O-methyluridine-3'-phosphate
  modified_base 13: mod_base = OTHER; note = 2'-O-methylcytidine-3'-phosphate
  modified_base 14: mod_base = OTHER; note = 2'-O-methylcytidine-3'-phosphate
  modified_base 15: mod_base = OTHER; note = 2'-O-methyladenosine-3'-phosphate
  modified_base 16: mod_base = OTHER; note = 2'-O-methylcytidine-3'-phosphate
  modified_base 17: mod_base = OTHER; note = 2'-O-methylcytidine-3'-phosphate
  modified_base 18: mod_base = OTHER; note = 2'-O-methyladenosine-3'-phosphate
  modified_base 19: mod_base = OTHER; note = 2'-O-methyladenosine-3'-phosphate
  modified_base 20: mod_base = OTHER; note = 2'-O-methyladenosine-3'-phosphate
  modified_base 21: mod_base = OTHER; note = 2'-O-methyladenosine-3'-phosphate ((2S,4R)-1-[29-[[2-(acetylamino)-2-deoxy-beta-D-galactopyra nosyl]oxy]-14,14-bis[[3-[[3-[[5-[[2-(acetylamino)-2-deoxy-b eta-D-galactopyranosyl]oxy]-1-oxopentyl]amino]propyl]amino] -3-oxopropoxy]methyl]-1,12,19,25-tetraoxo-16-oxa-13,20,24-t riazanonacos-1-yl]-4-hydroxy-2-pyrrolidinyl)methyl ester
accagatgttttccaccaaaa

SEQ ID NO: 54 - RNA, 23 nt, synthetic construct
  source 1..23: mol_type = other RNA
  modified_base 1: mod_base = OTHER; note = 2'-O-methyluridine-3'-phosphorothioate 5'-(E)-Vinylphosphonate
  modified_base 2: mod_base = OTHER; note = 2'-deoxy-2'-fluorouridine-3'-phosphorothioate
  modified_base 3: mod_base = OTHER; note = 2'-O-methyluridine-3'-phosphate
  modified_base 4: mod_base = OTHER; note = 2'-O-methyluridine-3'-phosphate
  modified_base 5: mod_base = OTHER; note = 2'-O-methylguanosine-3'-phosphate
  modified_base 6: mod_base = OTHER; note = 2'-deoxy-2'-fluoroguanosine-3'-phosphate
  modified_base 7: mod_base = OTHER; note = 2'-O-methyluridine-3'-phosphate
  modified_base 8: mod_base = OTHER; note = 2'-deoxy-2'-fluoroguanosine-3'-phosphate
  modified_base 9: mod_base = OTHER; note = 2'-deoxy-2'-fluoroguanosine-3'-phosphate
  modified_base 10: mod_base = OTHER; note = 2'-O-methyladenosine-3'-phosphate
  modified_base 11: mod_base = OTHER; note = 2'-O-methyladenosine-3'-phosphate
  modified_base 12: mod_base = OTHER; note = 2'-O-methyladenosine-3'-phosphate
  modified_base 13: mod_base = OTHER; note = 2'-O-methyladenosine-3'-phosphate
  modified_base 14: mod_base = OTHER; note = 2'-deoxy-2'-fluorocytidine-3'-phosphate
  modified_base 15: mod_base = OTHER; note = 2'-O-methyladenosine-3'-phosphate
  modified_base 16: mod_base = OTHER; note = 2'-deoxy-2'-fluorouridine-3'-phosphate
  modified_base 17: mod_base = OTHER; note = 2'-O-methylcytidine-3'-phosphate
  modified_base 18: mod_base = OTHER; note = 2'-O-methyluridine-3'-phosphate
  modified_base 19: mod_base = OTHER; note = 2'-O-methylguanosine-3'-phosphate
  modified_base 20: mod_base = OTHER; note = 2'-O-methylguanosine-3'-phosphate
  modified_base 21: mod_base = OTHER; note = 2'-O-methyluridine-3'-phosphorothioate
  modified_base 22: mod_base = OTHER; note = 2'-O-methyluridine-3'-phosphorothioate
  modified_base 23: mod_base = OTHER; note = 2'-O-methyluridine
ttttggtggaaaacatctggttt

SEQ ID NO: 55 - RNA, 23 nt, synthetic construct
  source 1..23: mol_type = other RNA
aaaccagatgttttccaccaaag

SEQ ID NO: 56 - RNA, 21 nt, synthetic construct
  source 1..21: mol_type = other RNA
  modified_base 1: mod_base = OTHER; note = 2'-O-methyladenosine-3'-phosphorothioate
  modified_base 2: mod_base = OTHER; note = 2'-O-methyluridine-3'-phosphorothioate
  modified_base 3: mod_base = OTHER; note = 2'-O-methylguanosine-3'-phosphate
  modified_base 4: mod_base = OTHER; note = 2'-O-methylguanosine-3'-phosphate
  modified_base 5: mod_base = OTHER; note = 2'-O-methylcytidine-3'-phosphate
  modified_base 6: mod_base = OTHER; note = 2'-O-methyluridine-3'-phosphate
  modified_base 7: mod_base = OTHER; note = 2'-deoxy-2'-fluoroguanosine-3'-phosphate
  modified_base 8: mod_base = OTHER; note = 2'-O-methyluridine-3'-phosphate
  modified_base 9: mod_base = OTHER; note = 2'-deoxy-2'-fluoroguanosine-3'-phosphate
  modified_base 10: mod_base = OTHER; note = 2'-deoxy-2'-fluoroguanosine-3'-phosphate
  modified_base 11: mod_base = OTHER; note = 2'-deoxy-2'-fluoroadenosine-3'-phosphate
  modified_base 12: mod_base = OTHER; note = 2'-O-methylcytidine-3'-phosphate
  modified_base 13: mod_base = OTHER; note = 2'-O-methyladenosine-3'-phosphate
  modified_base 14: mod_base = OTHER; note = 2'-O-methylguanosine-3'-phosphate
  modified_base 15: mod_base = OTHER; note = 2'-O-methyluridine-3'-phosphate
  modified_base 16: mod_base = OTHER; note = 2'-O-methyladenosine-3'-phosphate
  modified_base 17: mod_base = OTHER; note = 2'-O-methylcytidine-3'-phosphate
  modified_base 18: mod_base = OTHER; note = 2'-O-methyluridine-3'-phosphate
  modified_base 19: mod_base = OTHER; note = 2'-O-methylcytidine-3'-phosphate
  modified_base 20: mod_base = OTHER; note = 2'-O-methyluridine-3'-phosphate
  modified_base 21: mod_base = OTHER; note = 2'-O-methyladenosine-3'-phosphate ((2S,4R)-1-[29-[[2-(acetylamino)-2-deoxy-beta-D-galactopyra nosyl]oxy]-14,14-bis[[3-[[3-[[5-[[2-(acetylamino)-2-deoxy-b eta-D-galactopyranosyl]oxy]-1-oxopentyl]amino]propyl]amino] -3-oxopropoxy]methyl]-1,12,19,25-tetraoxo-16-oxa-13,20,24-t riazanonacos-1-yl]-4-hydroxy-2-pyrrolidinyl)methyl ester
atggctgtggacagtactcta

SEQ ID NO: 57 - RNA, 23 nt, synthetic construct
  source 1..23: mol_type = other RNA
  modified_base 1: mod_base = OTHER; note = 2'-O-methyluridine-3'-phosphorothioate 5'-(E)-Vinylphosphonate
  modified_base 2: mod_base = OTHER; note = 2'-deoxy-2'-fluoroadenosine-3'-phosphorothioate
  modified_base 3: mod_base = OTHER; note = 2'-O-methylguanosine-3'-phosphate
  modified_base 4: mod_base = OTHER; note = 2'-O-methyladenosine-3'-phosphate
  modified_base 5: mod_base = OTHER; note = 2'-O-methylguanosine-3'-phosphate
  modified_base 6: mod_base = OTHER; note = 2'-deoxy-2'-fluorouridine-3'-phosphate
  modified_base 7: mod_base = OTHER; note = 2'-O-methyladenosine-3'-phosphate
  modified_base 8: mod_base = OTHER; note = 2'-deoxy-2'-fluorocytidine-3'-phosphate
  modified_base 9: mod_base = OTHER; note = 2'-deoxy-2'-fluorouridine-3'-phosphate
  modified_base 10: mod_base = OTHER; note = 2'-O-methylguanosine-3'-phosphate
  modified_base 11: mod_base = OTHER; note = 2'-O-methyluridine-3'-phosphate
  modified_base 12: mod_base = OTHER; note = 2'-O-methylcytidine-3'-phosphate
  modified_base 13: mod_base = OTHER; note = 2'-O-methylcytidine-3'-phosphate
  modified_base 14: mod_base = OTHER; note = 2'-deoxy-2'-fluoroadenosine-3'-phosphate
  modified_base 15: mod_base = OTHER; note = 2'-O-methylcytidine-3'-phosphate
  modified_base 16: mod_base = OTHER; note = 2'-deoxy-2'-fluoroadenosine-3'-phosphate
  modified_base 17: mod_base = OTHER; note = 2'-O-methylguanosine-3'-phosphate
  modified_base 18: mod_base = OTHER; note = 2'-O-methylcytidine-3'-phosphate
  modified_base 19: mod_base = OTHER; note = 2'-O-methylcytidine-3'-phosphate
  modified_base 20: mod_base = OTHER; note = 2'-O-methyladenosine-3'-phosphate
  modified_base 21: mod_base = OTHER; note = 2'-O-methyluridine-3'-phosphorothioate
  modified_base 22: mod_base = OTHER; note = 2'-O-methylguanosine-3'-phosphorothioate
  modified_base 23: mod_base = OTHER; note = 2'-O-methylguanosine
tagagtactgtccacagccatgg

SEQ ID NO: 58 - RNA, 23 nt, synthetic construct
  source 1..23: mol_type = other RNA
ccatggctgtggacagtactctg

SEQ ID NO: 59 - RNA, 21 nt, synthetic construct
  source 1..21: mol_type = other RNA
  modified_base 1: mod_base = OTHER; note = 2'-O-methylcytidine-3'-phosphorothioate
  modified_base 2: mod_base = OTHER; note = 2'-O-methyladenosine-3'-phosphorothioate
  modified_base 3: mod_base = OTHER; note = 2'-O-methylguanosine-3'-phosphate
  modified_base 4: mod_base = OTHER; note = 2'-O-methylguanosine-3'-phosphate
  modified_base 5: mod_base = OTHER; note = 2'-O-methyladenosine-3'-phosphate
  modified_base 6: mod_base = OTHER; note = 2'-O-methylguanosine-3'-phosphate
  modified_base 7: mod_base = OTHER; note = 2'-deoxy-2'-fluoroadenosine-3'-phosphate
  modified_base 8: mod_base = OTHER; note = 2'-O-methyladenosine-3'-phosphate
  modified_base 9: mod_base = OTHER; note = 2'-deoxy-2'-fluoroadenosine-3'-phosphate
  modified_base 10: mod_base = OTHER; note = 2'-deoxy-2'-fluorocytidine-3'-phosphate
  modified_base 11: mod_base = OTHER; note = 2'-deoxy-2'-fluorocytidine-3'-phosphate
  modified_base 12: mod_base = OTHER; note = 2'-O-methyluridine-3'-phosphate
  modified_base 13: mod_base = OTHER; note = 2'-O-methyluridine-3'-phosphate
  modified_base 14: mod_base = OTHER; note = 2'-O-methyladenosine-3'-phosphate
  modified_base 15: mod_base = OTHER; note = 2'-O-methyluridine-3'-phosphate
  modified_base 16: mod_base = OTHER; note = 2'-O-methylcytidine-3'-phosphate
  modified_base 17: mod_base = OTHER; note = 2'-O-methyladenosine-3'-phosphate
  modified_base 18: mod_base = OTHER; note = 2'-O-methyladenosine-3'-phosphate
  modified_base 19: mod_base = OTHER; note = 2'-O-methyladenosine-3'-phosphate
  modified_base 20: mod_base = OTHER; note = 2'-O-methyladenosine-3'-phosphate
  modified_base 21: mod_base = OTHER; note = 2'-O-methyladenosine-3'-phosphate ((2S,4R)-1-[29-[[2-(acetylamino)-2-deoxy-beta-D-galactopyra nosyl]oxy]-14,14-bis[[3-[[3-[[5-[[2-(acetylamino)-2-deoxy-b eta-D-galactopyranosyl]oxy]-1-oxopentyl]amino]propyl]amino] -3-oxopropoxy]methyl]-1,12,19,25-tetraoxo-16-oxa-13,20,24-t riazanonacos-1-yl]-4-hydroxy-2-pyrrolidinyl)methyl ester
caggagaaaccttatcaaaaa

SEQ ID NO: 60 - RNA, 23 nt, synthetic construct
  source 1..23: mol_type = other RNA
  modified_base 1: mod_base = OTHER; note = 2'-O-methyluridine-3'-phosphorothioate 5'-(E)-Vinylphosphonate
  modified_base 2: mod_base = OTHER; note = 2'-deoxy-2'-fluorouridine-3'-phosphorothioate
  modified_base 3: mod_base = OTHER; note = 2'-O-methyluridine-3'-phosphate
  modified_base 4: mod_base = OTHER; note = 2'-O-methyluridine-3'-phosphate
  modified_base 5: mod_base = OTHER; note = 2'-O-methyluridine-3'-phosphate
  modified_base 6: mod_base = OTHER; note = 2'-deoxy-2'-fluoroguanosine-3'-phosphate
  modified_base 7: mod_base = OTHER; note = 2'-O-methyladenosine-3'-phosphate
  modified_base 8: mod_base = OTHER; note = 2'-deoxy-2'-fluorouridine-3'-phosphate
  modified_base 9: mod_base = OTHER; note = 2'-deoxy-2'-fluoroadenosine-3'-phosphate
  modified_base 10: mod_base = OTHER; note = 2'-O-methyladenosine-3'-phosphate
  modified_base 11: mod_base = OTHER; note = 2'-O-methylguanosine-3'-phosphate
  modified_base 12: mod_base = OTHER; note = 2'-O-methylguanosine-3'-phosphate
  modified_base 13: mod_base = OTHER; note = 2'-O-methyluridine-3'-phosphate
  modified_base 14: mod_base = OTHER; note = 2'-deoxy-2'-fluorouridine-3'-phosphate
  modified_base 15: mod_base = OTHER; note = 2'-O-methyluridine-3'-phosphate
  modified_base 16: mod_base = OTHER; note = 2'-deoxy-2'-fluorocytidine-3'-phosphate
  modified_base 17: mod_base = OTHER; note = 2'-O-methyluridine-3'-phosphate
  modified_base 18: mod_base = OTHER; note = 2'-O-methylcytidine-3'-phosphate
  modified_base 19: mod_base = OTHER; note = 2'-O-methylcytidine-3'-phosphate
  modified_base 20: mod_base = OTHER; note = 2'-O-methyluridine-3'-phosphate
  modified_base 21: mod_base = OTHER; note = 2'-O-methylguanosine-3'-phosphorothioate
  modified_base 22: mod_base = OTHER; note = 2'-O-methylguanosine-3'-phosphorothioate
  modified_base 23: mod_base = OTHER; note = 2'-O-methylcytidine
tttttgataaggtttctcctggc

SEQ ID NO: 61 - RNA, 23 nt, synthetic construct
  source 1..23: mol_type = other RNA
gccaggagaaaccttatcaaaac

SEQ ID NO: 62 - RNA, 21 nt, synthetic construct
  source 1..21: mol_type = other RNA
  modified_base 1: mod_base = OTHER; note = 2'-O-methylguanosine-3'-phosphorothioate
  modified_base 2: mod_base = OTHER; note = 2'-O-methylguanosine-3'-phosphorothioate
  modified_base 3: mod_base = OTHER; note = 2'-O-methyladenosine-3'-phosphate
  modified_base 4: mod_base = OTHER; note = 2'-O-methylguanosine-3'-phosphate
  modified_base 5: mod_base = OTHER; note = 2'-O-methyladenosine-3'-phosphate
  modified_base 6: mod_base = OTHER; note = 2'-O-methyladenosine-3'-phosphate
  modified_base 7: mod_base = OTHER; note = 2'-deoxy-2'-fluoroadenosine-3'-phosphate
  modified_base 8: mod_base = OTHER; note = 2'-O-methylcytidine-3'-phosphate
  modified_base 9: mod_base = OTHER; note = 2'-deoxy-2'-fluorocytidine-3'-phosphate
  modified_base 10: mod_base = OTHER; note = 2'-deoxy-2'-fluorouridine-3'-phosphate
  modified_base 11: mod_base = OTHER; note = 2'-deoxy-2'-fluorouridine-3'-phosphate
  modified_base 12: mod_base = OTHER; note = 2'-O-methyladenosine-3'-phosphate
  modified_base 13: mod_base = OTHER; note = 2'-O-methyluridine-3'-phosphate
  modified_base 14: mod_base = OTHER; note = 2'-O-methylcytidine-3'-phosphate
  modified_base 15: mod_base = OTHER; note = 2'-O-methyladenosine-3'-phosphate
  modified_base 16: mod_base = OTHER; note = 2'-O-methyladenosine-3'-phosphate
  modified_base 17: mod_base = OTHER; note = 2'-O-methyladenosine-3'-phosphate
  modified_base 18: mod_base = OTHER; note = 2'-O-methyladenosine-3'-phosphate
  modified_base 19: mod_base = OTHER; note = 2'-O-methylcytidine-3'-phosphate
  modified_base 20: mod_base = OTHER; note = 2'-O-methyladenosine-3'-phosphate
  modified_base 21: mod_base = OTHER; note = 2'-O-methyladenosine-3'-phosphate ((2S,4R)-1-[29-[[2-(acetylamino)-2-deoxy-beta-D-galactopyra nosyl]oxy]-14,14-bis[[3-[[3-[[5-[[2-(acetylamino)-2-deoxy-b eta-D-galactopyranosyl]oxy]-1-oxopentyl]amino]propyl]amino] -3-oxopropoxy]methyl]-1,12,19,25-tetraoxo-16-oxa-13,20,24-t riazanonacos-1-yl]-4-hydroxy-2-pyrrolidinyl)methyl ester
ggagaaaccttatcaaaacaa

SEQ ID NO: 63 - RNA, 23 nt, synthetic construct
  source 1..23: mol_type = other RNA
  modified_base 1: mod_base = OTHER; note = 2'-O-methyluridine-3'-phosphorothioate 5'-(E)-Vinylphosphonate
  modified_base 2: mod_base = OTHER; note = 2'-deoxy-2'-fluorouridine-3'-phosphorothioate
  modified_base 3: mod_base = OTHER; note = 2'-O-methylguanosine-3'-phosphate
  modified_base 4: mod_base = OTHER; note = 2'-O-methyluridine-3'-phosphate
  modified_base 5: mod_base = OTHER; note = 2'-O-methyluridine-3'-phosphate
  modified_base 6: mod_base = OTHER; note = 2'-deoxy-2'-fluorouridine-3'-phosphate
  modified_base 7: mod_base = OTHER; note = 2'-O-methyluridine-3'-phosphate
  modified_base 8: mod_base = OTHER; note = 2'-deoxy-2'-fluoroguanosine-3'-phosphate
  modified_base 9: mod_base = OTHER; note = 2'-deoxy-2'-fluoroadenosine-3'-phosphate
  modified_base 10: mod_base = OTHER; note = 2'-O-methyluridine-3'-phosphate
  modified_base 11: mod_base = OTHER; note = 2'-O-methyladenosine-3'-phosphate
  modified_base 12: mod_base = OTHER; note = 2'-O-methyladenosine-3'-phosphate
  modified_base 13: mod_base = OTHER; note = 2'-O-methylguanosine-3'-phosphate
  modified_base 14: mod_base = OTHER; note = 2'-deoxy-2'-fluoroguanosine-3'-phosphate
  modified_base 15: mod_base = OTHER; note = 2'-O-methyluridine-3'-phosphate
  modified_base 16: mod_base = OTHER; note = 2'-deoxy-2'-fluorouridine-3'-phosphate
  modified_base 17: mod_base = OTHER; note = 2'-O-methyluridine-3'-phosphate
  modified_base 18: mod_base = OTHER; note = 2'-O-methylcytidine-3'-phosphate
  modified_base 19: mod_base = OTHER; note = 2'-O-methyluridine-3'-phosphate
  modified_base 20: mod_base = OTHER; note = 2'-O-methylcytidine-3'-phosphate
  modified_base 21: mod_base = OTHER; note = 2'-O-methylcytidine-3'-phosphorothioate
  modified_base 22: mod_base = OTHER; note = 2'-O-methyluridine-3'-phosphorothioate
  modified_base 23: mod_base = OTHER; note = 2'-O-methylguanosine
ttgttttgataaggtttctcctg

SEQ ID NO: 64 - RNA, 23 nt, synthetic construct
  source 1..23: mol_type = other RNA
caggagaaaccttatcaaaacaa

SEQ ID NO: 65 - RNA, 21 nt, synthetic construct
  source 1..21: mol_type = other RNA
  modified_base 1: mod_base = OTHER; note = 2'-O-methyluridine-3'-phosphorothioate
  modified_base 2: mod_base = OTHER; note = 2'-O-methyluridine-3'-phosphorothioate
  modified_base 3: mod_base = OTHER; note = 2'-O-methylguanosine-3'-phosphate
  modified_base 4: mod_base = OTHER; note = 2'-O-methyluridine-3'-phosphate
  modified_base 5: mod_base = OTHER; note = 2'-O-methylguanosine-3'-phosphate
  modified_base 6: mod_base = OTHER; note = 2'-O-methyluridine-3'-phosphate
  modified_base 7: mod_base = OTHER; note = 2'-deoxy-2'-fluorocytidine-3'-phosphate
  modified_base 8: mod_base = OTHER; note = 2'-O-methyladenosine-3'-phosphate
  modified_base 9: mod_base = OTHER; note = 2'-deoxy-2'-fluoroadenosine-3'-phosphate
  modified_base 10: mod_base = OTHER; note = 2'-deoxy-2'-fluoroadenosine-3'-phosphate
  modified_base 11: mod_base = OTHER; note = 2'-deoxy-2'-fluoroadenosine-3'-phosphate
  modified_base 12: mod_base = OTHER; note = 2'-O-methyluridine-3'-phosphate
  modified_base 13: mod_base = OTHER; note = 2'-O-methylguanosine-3'-phosphate
  modified_base 14: mod_base = OTHER; note = 2'-O-methyluridine-3'-phosphate
  modified_base 15: mod_base = OTHER; note = 2'-O-methyluridine-3'-phosphate
  modified_base 16: mod_base = OTHER; note = 2'-O-methylcytidine-3'-phosphate
  modified_base 17: mod_base = OTHER; note = 2'-O-methyluridine-3'-phosphate
  modified_base 18: mod_base = OTHER; note = 2'-O-methyladenosine-3'-phosphate
  modified_base 19: mod_base = OTHER; note = 2'-O-methylcytidine-3'-phosphate
  modified_base 20: mod_base = OTHER; note = 2'-O-methyladenosine-3'-phosphate
  modified_base 21: mod_base = OTHER; note = 2'-O-methyladenosine-3'-phosphate ((2S,4R)-1-[29-[[2-(acetylamino)-2-deoxy-beta-D-galactopyra nosyl]oxy]-14,14-bis[[3-[[3-[[5-[[2-(acetylamino)-2-deoxy-b eta-D-galactopyranosyl]oxy]-1-oxopentyl]amino]propyl]amino] -3-oxopropoxy]methyl]-1,12,19,25-tetraoxo-16-oxa-13,20,24-t riazanonacos-1-yl]-4-hydroxy-2-pyrrolidinyl)methyl ester
ttgtgtcaaaatgttctacaa

SEQ ID NO: 66 - RNA, 23 nt, synthetic construct
  source 1..23: mol_type = other RNA
  modified_base 1: mod_base = OTHER; note = 2'-O-methyluridine-3'-phosphorothioate 5'-(E)-Vinylphosphonate
  modified_base 2: mod_base = OTHER; note = 2'-deoxy-2'-fluorouridine-3'-phosphorothioate
  modified_base 3: mod_base = OTHER; note = 2'-O-methylguanosine-3'-phosphate
  modified_base 4: mod_base = OTHER; note = 2'-O-methyluridine-3'-phosphate
  modified_base 5: mod_base = OTHER; note = 2'-O-methyladenosine-3'-phosphate
  modified_base 6: mod_base = OTHER; note = 2'-deoxy-2'-fluoroguanosine-3'-phosphate
  modified_base 7: mod_base = OTHER; note = 2'-O-methyladenosine-3'-phosphate
  modified_base 8: mod_base = OTHER; note = 2'-deoxy-2'-fluoroadenosine-3'-phosphate
  modified_base 9: mod_base = OTHER; note = 2'-deoxy-2'-fluorocytidine-3'-phosphate
  modified_base 10: mod_base = OTHER; note = 2'-O-methyladenosine-3'-phosphate
  modified_base 11: mod_base = OTHER; note = 2'-O-methyluridine-3'-phosphate
  modified_base 12: mod_base = OTHER; note = 2'-O-methyluridine-3'-phosphate
  modified_base 13: mod_base = OTHER; note = 2'-O-methyluridine-3'-phosphate
  modified_base 14: mod_base = OTHER; note = 2'-deoxy-2'-fluorouridine-3'-phosphate
  modified_base 15: mod_base = OTHER; note = 2'-O-methylguanosine-3'-phosphate
  modified_base 16: mod_base = OTHER; note = 2'-deoxy-2'-fluoroadenosine-3'-phosphate
  modified_base 17: mod_base = OTHER; note = 2'-O-methylcytidine-3'-phosphate
  modified_base 18: mod_base = OTHER; note = 2'-O-methyladenosine-3'-phosphate
  modified_base 19: mod_base = OTHER; note = 2'-O-methylcytidine-3'-phosphate
  modified_base 20: mod_base = OTHER; note = 2'-O-methyladenosine-3'-phosphate
  modified_base 21: mod_base = OTHER; note = 2'-O-methyladenosine-3'-phosphorothioate
  modified_base 22: mod_base = OTHER; note = 2'-O-methyladenosine-3'-phosphorothioate
  modified_base 23: mod_base = OTHER; note = 2'-O-methyladenosine
ttgtagaacattttgacacaaaa

SEQ ID NO: 67 - RNA, 23 nt, synthetic construct
  source 1..23: mol_type = other RNA
ttttgtgtcaaaatgttctacat

SEQ ID NO: 68 - RNA, 21 nt, synthetic construct
  source 1..21: mol_type = other RNA
  modified_base 1: mod_base = OTHER; note = 2'-O-methyluridine-3'-phosphorothioate
  modified_base 2: mod_base = OTHER; note = 2'-O-methylguanosine-3'-phosphorothioate
  modified_base 3: mod_base = OTHER; note = 2'-O-methyluridine-3'-phosphate
  modified_base 4: mod_base = OTHER; note = 2'-O-methylguanosine-3'-phosphate
  modified_base 5: mod_base = OTHER; note = 2'-O-methyluridine-3'-phosphate
  modified_base 6: mod_base = OTHER; note = 2'-O-methylcytidine-3'-phosphate
  modified_base 7: mod_base = OTHER; note = 2'-deoxy-2'-fluoroadenosine-3'-phosphate
  modified_base 8: mod_base = OTHER; note = 2'-O-methyladenosine-3'-phosphate
  modified_base 9: mod_base = OTHER; note = 2'-deoxy-2'-fluoroadenosine-3'-phosphate
  modified_base 10: mod_base = OTHER; note = 2'-deoxy-2'-fluoroadenosine-3'-phosphate
  modified_base 11: mod_base = OTHER; note = 2'-deoxy-2'-fluorouridine-3'-phosphate
  modified_base 12: mod_base = OTHER; note = 2'-O-methylguanosine-3'-phosphate
  modified_base 13: mod_base = OTHER; note = 2'-O-methyluridine-3'-phosphate
  modified_base 14: mod_base = OTHER; note = 2'-O-methyluridine-3'-phosphate
  modified_base 15: mod_base = OTHER; note = 2'-O-methylcytidine-3'-phosphate
  modified_base 16: mod_base = OTHER; note = 2'-O-methyluridine-3'-phosphate
  modified_base 17: mod_base = OTHER; note = 2'-O-methyladenosine-3'-phosphate
  modified_base 18: mod_base = OTHER; note = 2'-O-methylcytidine-3'-phosphate
  modified_base 19: mod_base = OTHER; note = 2'-O-methyladenosine-3'-phosphate
  modified_base 20: mod_base = OTHER; note = 2'-O-methyluridine-3'-phosphate
  modified_base 21: mod_base = OTHER; note = 2'-O-methyladenosine-3'-phosphate ((2S,4R)-1-[29-[[2-(acetylamino)-2-deoxy-beta-D-galactopyra nosyl]oxy]-14,14-bis[[3-[[3-[[5-[[2-(acetylamino)-2-deoxy-b eta-D-galactopyranosyl]oxy]-1-oxopentyl]amino]propyl]amino] -3-oxopropoxy]methyl]-1,12,19,25-tetraoxo-16-oxa-13,20,24-t riazanonacos-1-yl]-4-hydroxy-2-pyrrolidinyl)methyl ester
tgtgtcaaaatgttctacata

SEQ ID NO: 69 - RNA, 23 nt, synthetic construct
  source 1..23: mol_type = other RNA
  modified_base 1: mod_base = OTHER; note = 2'-O-methyluridine-3'-phosphorothioate 5'-(E)-Vinylphosphonate
  modified_base 2: mod_base = OTHER; note = 2'-deoxy-2'-fluoroadenosine-3'-phosphorothioate
  modified_base 3: mod_base = OTHER; note = 2'-O-methyluridine-3'-phosphate
  modified_base 4: mod_base = OTHER; note = 2'-O-methylguanosine-3'-phosphate
  modified_base 5: mod_base = OTHER; note = 2'-O-methyluridine-3'-phosphate
  modified_base 6: mod_base = OTHER; note = 2'-deoxy-2'-fluoroadenosine-3'-phosphate
  modified_base 7: mod_base = OTHER; note = 2'-O-methylguanosine-3'-phosphate
  modified_base 8: mod_base = OTHER; note = 2'-deoxy-2'-fluoroadenosine-3'-phosphate
  modified_base 9: mod_base = OTHER; note = 2'-deoxy-2'-fluoroadenosine-3'-phosphate
  modified_base 10: mod_base = OTHER; note = 2'-O-methylcytidine-3'-phosphate
  modified_base 11: mod_base = OTHER; note = 2'-O-methyladenosine-3'-phosphate
  modified_base 12: mod_base = OTHER; note = 2'-O-methyluridine-3'-phosphate
  modified_base 13: mod_base = OTHER; note = 2'-O-methyluridine-3'-phosphate
  modified_base 14: mod_base = OTHER; note = 2'-deoxy-2'-fluorouridine-3'-phosphate
  modified_base 15: mod_base = OTHER; note = 2'-O-methyluridine-3'-phosphate
  modified_base 16: mod_base = OTHER; note = 2'-deoxy-2'-fluoroguanosine-3'-phosphate
  modified_base 17: mod_base = OTHER; note = 2'-O-methyladenosine-3'-phosphate
  modified_base 18: mod_base = OTHER; note = 2'-O-methylcytidine-3'-phosphate
  modified_base 19: mod_base = OTHER; note = 2'-O-methyladenosine-3'-phosphate
  modified_base 20: mod_base = OTHER; note = 2'-O-methylcytidine-3'-phosphate
  modified_base 21: mod_base = OTHER; note = 2'-O-methyladenosine-3'-phosphorothioate
  modified_base 22: mod_base = OTHER; note = 2'-O-methyladenosine-3'-phosphorothioate
  modified_base 23: mod_base = OTHER; note = 2'-O-methyladenosine
tatgtagaacattttgacacaaa

SEQ ID NO: 70 - RNA, 23 nt, synthetic construct
  source 1..23: mol_type = other RNA
tttgtgtcaaaatgttctacatt

SEQ ID NO: 71 - RNA, 21 nt, synthetic construct
  source 1..21: mol_type = other RNA
  modified_base 1: mod_base = OTHER; note = 2'-O-methylguanosine-3'-phosphorothioate
  modified_base 2: mod_base = OTHER; note = 2'-O-methyluridine-3'-phosphorothioate
  modified_base 3: mod_base = OTHER; note = 2'-O-methylguanosine-3'-phosphate
  modified_base 4: mod_base = OTHER; note = 2'-O-methyluridine-3'-phosphate
  modified_base 5: mod_base = OTHER; note = 2'-O-methylcytidine-3'-phosphate
  modified_base 6: mod_base = OTHER; note = 2'-O-methyladenosine-3'-phosphate
  modified_base 7: mod_base = OTHER; note = 2'-deoxy-2'-fluoroadenosine-3'-phosphate
  modified_base 8: mod_base = OTHER; note = 2'-O-methyladenosine-3'-phosphate
  modified_base 9: mod_base = OTHER; note = 2'-deoxy-2'-fluoroadenosine-3'-phosphate
  modified_base 10: mod_base = OTHER; note = 2'-deoxy-2'-fluorouridine-3'-phosphate
  modified_base 11: mod_base = OTHER; note = 2'-deoxy-2'-fluoroguanosine-3'-phosphate
  modified_base 12: mod_base = OTHER; note = 2'-O-methyluridine-3'-phosphate
  modified_base 13: mod_base = OTHER; note = 2'-O-methyluridine-3'-phosphate
  modified_base 14: mod_base = OTHER; note = 2'-O-methylcytidine-3'-phosphate
  modified_base 15: mod_base = OTHER; note = 2'-O-methyluridine-3'-phosphate
  modified_base 16: mod_base = OTHER; note = 2'-O-methyladenosine-3'-phosphate
  modified_base 17: mod_base = OTHER; note = 2'-O-methylcytidine-3'-phosphate
  modified_base 18: mod_base = OTHER; note = 2'-O-methyladenosine-3'-phosphate
  modified_base 19: mod_base = OTHER; note = 2'-O-methyluridine-3'-phosphate
  modified_base 20: mod_base = OTHER; note = 2'-O-methyluridine-3'-phosphate
  modified_base 21: mod_base = OTHER; note = 2'-O-methyladenosine-3'-phosphate ((2S,4R)-1-[29-[[2-(acetylamino)-2-deoxy-beta-D-galactopyra nosyl]oxy]-14,14-bis[[3-[[3-[[5-[[2-(acetylamino)-2-deoxy-b eta-D-galactopyranosyl]oxy]-1-oxopentyl]amino]propyl]amino] -3-oxopropoxy]methyl]-1,12,19,25-tetraoxo-16-oxa-13,20,24-t riazanonacos-1-yl]-4-hydroxy-2-pyrrolidinyl)methyl ester
gtgtcaaaatgttctacatta

SEQ ID NO: 72 - RNA, 23 nt, synthetic construct
  source 1..23: mol_type = other RNA
  modified_base 1: mod_base = OTHER; note = 2'-O-methyluridine-3'-phosphorothioate 5'-(E)-Vinylphosphonate
  modified_base 2: mod_base = OTHER; note = 2'-deoxy-2'-fluoroadenosine-3'-phosphorothioate
  modified_base 3: mod_base = OTHER; note = 2'-O-methyladenosine-3'-phosphate
  modified_base 4: mod_base = OTHER; note = 2'-O-methyluridine-3'-phosphate
  modified_base 5: mod_base = OTHER; note = 2'-O-methylguanosine-3'-phosphate
  modified_base 6: mod_base = OTHER; note = 2'-deoxy-2'-fluorouridine-3'-phosphate
  modified_base 7: mod_base = OTHER; note = 2'-O-methyladenosine-3'-phosphate
  modified_base 8: mod_base = OTHER; note = 2'-deoxy-2'-fluoroguanosine-3'-phosphate
  modified_base 9: mod_base = OTHER; note = 2'-deoxy-2'-fluoroadenosine-3'-phosphate
  modified_base 10: mod_base = OTHER; note = 2'-O-methyladenosine-3'-phosphate
  modified_base 11: mod_base = OTHER; note = 2'-O-methylcytidine-3'-phosphate
  modified_base 12: mod_base = OTHER; note = 2'-O-methyladenosine-3'-phosphate
  modified_base 13: mod_base = OTHER; note = 2'-O-methyluridine-3'-phosphate
  modified_base 14: mod_base = OTHER; note = 2'-deoxy-2'-fluorouridine-3'-phosphate
  modified_base 15: mod_base = OTHER; note = 2'-O-methyluridine-3'-phosphate
  modified_base 16: mod_base = OTHER; note = 2'-deoxy-2'-fluorouridine-3'-phosphate
  modified_base 17: mod_base = OTHER; note = 2'-O-methylguanosine-3'-phosphate
  modified_base 18: mod_base = OTHER; note = 2'-O-methyladenosine-3'-phosphate
  modified_base 19: mod_base = OTHER; note = 2'-O-methylcytidine-3'-phosphate
  modified_base 20: mod_base = OTHER; note = 2'-O-methyladenosine-3'-phosphate
  modified_base 21: mod_base = OTHER; note = 2'-O-methylcytidine-3'-phosphorothioate
  modified_base 22: mod_base = OTHER; note = 2'-O-methyladenosine-3'-phosphorothioate
  modified_base 23: mod_base = OTHER; note = 2'-O-methyladenosine
taatgtagaacattttgacacaa

SEQ ID NO: 73 - RNA, 23 nt, synthetic construct
  source 1..23: mol_type = other RNA
ttgtgtcaaaatgttctacatta

SEQ ID NO: 74 - RNA, 21 nt, synthetic construct
  source 1..21: mol_type = other RNA
  modified_base 1: mod_base = OTHER; note = 2'-O-methyluridine-3'-phosphorothioate
  modified_base 2: mod_base = OTHER; note = 2'-O-methylguanosine-3'-phosphorothioate
  modified_base 3: mod_base = OTHER; note = 2'-O-methyluridine-3'-phosphate
  modified_base 4: mod_base = OTHER; note = 2'-O-methylcytidine-3'-phosphate
  modified_base 5: mod_base = OTHER; note = 2'-O-methyladenosine-3'-phosphate
  modified_base 6: mod_base = OTHER; note = 2'-O-methyladenosine-3'-phosphate
  modified_base 7: mod_base = OTHER; note = 2'-deoxy-2'-fluoroadenosine-3'-phosphate
  modified_base 8: mod_base = OTHER; note = 2'-O-methyladenosine-3'-phosphate
  modified_base 9: mod_base = OTHER; note = 2'-deoxy-2'-fluorouridine-3'-phosphate
  modified_base 10: mod_base = OTHER; note = 2'-deoxy-2'-fluoroguanosine-3'-phosphate
  modified_base 11: mod_base = OTHER; note = 2'-deoxy-2'-fluorouridine-3'-phosphate
  modified_base 12: mod_base = OTHER; note = 2'-O-methyluridine-3'-phosphate
  modified_base 13: mod_base = OTHER; note = 2'-O-methylcytidine-3'-phosphate
  modified_base 14: mod_base = OTHER; note = 2'-O-methyluridine-3'-phosphate
  modified_base 15: mod_base = OTHER; note = 2'-O-methyladenosine-3'-phosphate
  modified_base 16: mod_base = OTHER; note = 2'-O-methylcytidine-3'-phosphate
  modified_base 17: mod_base = OTHER; note = 2'-O-methyladenosine-3'-phosphate
  modified_base 18: mod_base = OTHER; note = 2'-O-methyluridine-3'-phosphate
  modified_base 19: mod_base = OTHER; note = 2'-O-methyluridine-3'-phosphate
  modified_base 20: mod_base = OTHER; note = 2'-O-methyladenosine-3'-phosphate
  modified_base 21: mod_base = OTHER; note = 2'-O-methyladenosine-3'-phosphate ((2S,4R)-1-[29-[[2-(acetylamino)-2-deoxy-beta-D-galactopyra nosyl]oxy]-14,14-bis[[3-[[3-[[5-[[2-(acetylamino)-2-deoxy-b eta-D-galactopyranosyl]oxy]-1-oxopentyl]amino]propyl]amino] -3-oxopropoxy]methyl]-1,12,19,25-tetraoxo-16-oxa-13,20,24-t riazanonacos-1-yl]-4-hydroxy-2-pyrrolidinyl)methyl ester
tgtcaaaatgttctacattaa

SEQ ID NO: 75 - RNA, 23 nt, synthetic construct
  source 1..23: mol_type = other RNA
  modified_base 1: mod_base = OTHER; note = 2'-O-methyluridine-3'-phosphorothioate 5'-(E)-Vinylphosphonate
  modified_base 2: mod_base = OTHER; note = 2'-deoxy-2'-fluorouridine-3'-phosphorothioate
  modified_base 3: mod_base = OTHER; note = 2'-O-methyladenosine-3'-phosphate
  modified_base 4: mod_base = OTHER; note = 2'-O-methyladenosine-3'-phosphate
  modified_base 5: mod_base = OTHER; note = 2'-O-methyluridine-3'-phosphate
  modified_base 6: mod_base = OTHER; note = 2'-deoxy-2'-fluoroguanosine-3'-phosphate
  modified_base 7: mod_base = OTHER; note = 2'-O-methyluridine-3'-phosphate
  modified_base 8: mod_base = OTHER; note = 2'-deoxy-2'-fluoroadenosine-3'-phosphate
  modified_base 9: mod_base = OTHER; note = 2'-deoxy-2'-fluoroguanosine-3'-phosphate
  modified_base 10: mod_base = OTHER; note = 2'-O-methyladenosine-3'-phosphate
  modified_base 11: mod_base = OTHER; note = 2'-O-methyladenosine-3'-phosphate
  modified_base 12: mod_base = OTHER; note = 2'-O-methylcytidine-3'-phosphate
  modified_base 13: mod_base = OTHER; note = 2'-O-methyladenosine-3'-phosphate
  modified_base 14: mod_base = OTHER; note = 2'-deoxy-2'-fluorouridine-3'-phosphate
  modified_base 15: mod_base = OTHER; note = 2'-O-methyluridine-3'-phosphate
  modified_base 16: mod_base = OTHER; note = 2'-deoxy-2'-fluorouridine-3'-phosphate
  modified_base 17: mod_base = OTHER; note = 2'-O-methyluridine-3'-phosphate
  modified_base 18: mod_base = OTHER; note = 2'-O-methylguanosine-3'-phosphate
  modified_base 19: mod_base = OTHER; note = 2'-O-methyladenosine-3'-phosphate
  modified_base 20: mod_base = OTHER; note = 2'-O-methylcytidine-3'-phosphate
  modified_base 21: mod_base = OTHER; note = 2'-O-methyladenosine-3'-phosphorothioate
  modified_base 22: mod_base = OTHER; note = 2'-O-methylcytidine-3'-phosphorothioate
  modified_base 23: mod_base = OTHER; note = 2'-O-methyladenosine
ttaatgtagaacattttgacaca

SEQ ID NO: 76 - RNA, 23 nt, synthetic construct
  source 1..23: mol_type = other RNA
tgtgtcaaaatgttctacattaa

SEQ ID NO: 77 - RNA, 21 nt, synthetic construct
  source 1..21: mol_type = other RNA
  modified_base 1: mod_base = OTHER; note = 2'-O-methyladenosine-3'-phosphorothioate
  modified_base 2: mod_base = OTHER; note = 2'-O-methyladenosine-3'-phosphorothioate
  modified_base 3: mod_base = OTHER; note = 2'-O-methyluridine-3'-phosphate
  modified_base 4: mod_base = OTHER; note = 2'-O-methylguanosine-3'-phosphate
  modified_base 5: mod_base = OTHER; note = 2'-O-methyluridine-3'-phosphate
  modified_base 6: mod_base = OTHER; note = 2'-O-methyluridine-3'-phosphate
  modified_base 7: mod_base = OTHER; note = 2'-deoxy-2'-fluorocytidine-3'-phosphate
  modified_base 8: mod_base = OTHER; note = 2'-O-methyluridine-3'-phosphate
  modified_base 9: mod_base = OTHER; note = 2'-deoxy-2'-fluoroadenosine-3'-phosphate
  modified_base 10: mod_base = OTHER; note = 2'-deoxy-2'-fluorocytidine-3'-phosphate
  modified_base 11: mod_base = OTHER; note = 2'-deoxy-2'-fluoroadenosine-3'-phosphate
  modified_base 12: mod_base = OTHER; note = 2'-O-methyluridine-3'-phosphate
  modified_base 13: mod_base = OTHER; note = 2'-O-methyluridine-3'-phosphate
  modified_base 14: mod_base = OTHER; note = 2'-O-methyladenosine-3'-phosphate
  modified_base 15: mod_base = OTHER; note = 2'-O-methyladenosine-3'-phosphate
  modified_base 16: mod_base = OTHER; note = 2'-O-methylguanosine-3'-phosphate
  modified_base 17: mod_base = OTHER; note = 2'-O-methylcytidine-3'-phosphate
  modified_base 18: mod_base = OTHER; note = 2'-O-methylcytidine-3'-phosphate
  modified_base 19: mod_base = OTHER; note = 2'-O-methyladenosine-3'-phosphate
  modified_base 20: mod_base = OTHER; note = 2'-O-methyladenosine-3'-phosphate
  modified_base 21: mod_base = OTHER; note = 2'-O-methyladenosine-3'-phosphate ((2S,4R)-1-[29-[[2-(acetylamino)-2-deoxy-beta-D-galactopyra nosyl]oxy]-14,14-bis[[3-[[3-[[5-[[2-(acetylamino)-2-deoxy-b eta-D-galactopyranosyl]oxy]-1-oxopentyl]amino]propyl]amino] -3-oxopropoxy]methyl]-1,12,19,25-tetraoxo-16-oxa-13,20,24-t riazanonacos-1-yl]-4-hydroxy-2-pyrrolidinyl)methyl ester
aatgttctacattaagccaaa

SEQ ID NO: 78 - RNA, 23 nt, synthetic construct
  source 1..23: mol_type = other RNA
  modified_base 1: mod_base = OTHER; note = 2'-O-methyluridine-3'-phosphorothioate 5'-(E)-Vinylphosphonate
  modified_base 2: mod_base = OTHER; note = 2'-deoxy-2'-fluorouridine-3'-phosphorothioate
  modified_base 3: mod_base = OTHER; note = 2'-O-methyluridine-3'-phosphate
  modified_base 4: mod_base = OTHER; note = 2'-O-methylguanosine-3'-phosphate
  modified_base 5: mod_base = OTHER; note = 2'-O-methylguanosine-3'-phosphate
  modified_base 6: mod_base = OTHER; note = 2'-deoxy-2'-fluorocytidine-3'-phosphate
  modified_base 7: mod_base = OTHER; note = 2'-O-methyluridine-3'-phosphate
  modified_base 8: mod_base = OTHER; note = 2'-deoxy-2'-fluorouridine-3'-phosphate
  modified_base 9: mod_base = OTHER; note = 2'-deoxy-2'-fluoroadenosine-3'-phosphate
  modified_base 10: mod_base = OTHER; note = 2'-O-methyladenosine-3'-phosphate
  modified_base 11: mod_base = OTHER; note = 2'-O-methyluridine-3'-phosphate
  modified_base 12: mod_base = OTHER; note = 2'-O-methylguanosine-3'-phosphate
  modified_base 13: mod_base = OTHER; note = 2'-O-methyluridine-3'-phosphate
  modified_base 14: mod_base = OTHER; note = 2'-deoxy-2'-fluoroadenosine-3'-phosphate
  modified_base 15: mod_base = OTHER; note = 2'-O-methylguanosine-3'-phosphate
  modified_base 16: mod_base = OTHER; note = 2'-deoxy-2'-fluoroadenosine-3'-phosphate
  modified_base 17: mod_base = OTHER; note = 2'-O-methyladenosine-3'-phosphate
  modified_base 18: mod_base = OTHER; note = 2'-O-methylcytidine-3'-phosphate
  modified_base 19: mod_base = OTHER; note = 2'-O-methyladenosine-3'-phosphate
  modified_base 20: mod_base = OTHER; note = 2'-O-methyluridine-3'-phosphate
  modified_base 21: mod_base = OTHER; note = 2'-O-methyluridine-3'-phosphorothioate
  modified_base 22: mod_base = OTHER; note = 2'-O-methyluridine-3'-phosphorothioate
  modified_base 23: mod_base = OTHER; note = 2'-O-methyluridine
tttggcttaatgtagaacatttt

SEQ ID NO: 79 - RNA, 23 nt, synthetic construct
  source 1..23: mol_type = other RNA
aaaatgttctacattaagccaat

SEQ ID NO: 80 - RNA, 21 nt, synthetic construct
  source 1..21: mol_type = other RNA
  modified_base 1: mod_base = OTHER; note = 2'-O-methyladenosine-3'-phosphorothioate
  modified_base 2: mod_base = OTHER; note = 2'-O-methyluridine-3'-phosphorothioate
  modified_base 3: mod_base = OTHER; note = 2'-O-methylguanosine-3'-phosphate
  modified_base 4: mod_base = OTHER; note = 2'-O-methyluridine-3'-phosphate
  modified_base 5: mod_base = OTHER; note = 2'-O-methyluridine-3'-phosphate
  modified_base 6: mod_base = OTHER; note = 2'-O-methylcytidine-3'-phosphate
  modified_base 7: mod_base = OTHER; note = 2'-deoxy-2'-fluorouridine-3'-phosphate
  modified_base 8: mod_base = OTHER; note = 2'-O-methyladenosine-3'-phosphate
  modified_base 9: mod_base = OTHER; note = 2'-deoxy-2'-fluorocytidine-3'-phosphate
  modified_base 10: mod_base = OTHER; note = 2'-deoxy-2'-fluoroadenosine-3'-phosphate
  modified_base 11: mod_base = OTHER; note = 2'-deoxy-2'-fluorouridine-3'-phosphate
  modified_base 12: mod_base = OTHER; note = 2'-O-methyluridine-3'-phosphate
  modified_base 13: mod_base = OTHER; note = 2'-O-methyladenosine-3'-phosphate
  modified_base 14: mod_base = OTHER; note = 2'-O-methyladenosine-3'-phosphate
  modified_base 15: mod_base = OTHER; note = 2'-O-methylguanosine-3'-phosphate
  modified_base 16: mod_base = OTHER; note = 2'-O-methylcytidine-3'-phosphate
  modified_base 17: mod_base = OTHER; note = 2'-O-methylcytidine-3'-phosphate
  modified_base 18: mod_base = OTHER; note = 2'-O-methyladenosine-3'-phosphate
  modified_base 19: mod_base = OTHER; note = 2'-O-methyladenosine-3'-phosphate
  modified_base 20: mod_base = OTHER; note = 2'-O-methyluridine-3'-phosphate
  modified_base 21: mod_base = OTHER; note = 2'-O-methyladenosine-3'-phosphate ((2S,4R)-1-[29-[[2-(acetylamino)-2-deoxy-beta-D-galactopyra nosyl]oxy]-14,14-bis[[3-[[3-[[5-[[2-(acetylamino)-2-deoxy-b eta-D-galactopyranosyl]oxy]-1-oxopentyl]amino]propyl]amino] -3-oxopropoxy]methyl]-1,12,19,25-tetraoxo-16-oxa-13,20,24-t riazanonacos-1-yl]-4-hydroxy-2-pyrrolidinyl)methyl ester
atgttctacattaagccaata

SEQ ID NO: 81 - RNA, 23 nt, synthetic construct
  source 1..23: mol_type = other RNA
  modified_base 1: mod_base = OTHER; note = 2'-O-methyluridine-3'-phosphorothioate 5'-(E)-Vinylphosphonate
  modified_base 2: mod_base = OTHER; note = 2'-deoxy-2'-fluoroadenosine-3'-phosphorothioate
  modified_base 3: mod_base = OTHER; note = 2'-O-methyluridine-3'-phosphate
  modified_base 4: mod_base = OTHER; note = 2'-O-methyluridine-3'-phosphate
  modified_base 5: mod_base = OTHER; note = 2'-O-methylguanosine-3'-phosphate
  modified_base 6: mod_base = OTHER; note = 2'-deoxy-2'-fluoroguanosine-3'-phosphate
  modified_base 7: mod_base = OTHER; note = 2'-O-methylcytidine-3'-phosphate
  modified_base 8: mod_base = OTHER; note = 2'-deoxy-2'-fluorouridine-3'-phosphate
  modified_base 9: mod_base = OTHER; note = 2'-deoxy-2'-fluorouridine-3'-phosphate
  modified_base 10: mod_base = OTHER; note = 2'-O-methyladenosine-3'-phosphate
  modified_base 11: mod_base = OTHER; note = 2'-O-methyladenosine-3'-phosphate
  modified_base 12: mod_base = OTHER; note = 2'-O-methyluridine-3'-phosphate
  modified_base 13: mod_base = OTHER; note = 2'-O-methylguanosine-3'-phosphate
  modified_base 14: mod_base = OTHER; note = 2'-deoxy-2'-fluorouridine-3'-phosphate
  modified_base 15: mod_base = OTHER; note = 2'-O-methyladenosine-3'-phosphate
  modified_base 16: mod_base = OTHER; note = 2'-deoxy-2'-fluoroguanosine-3'-phosphate
  modified_base 17: mod_base = OTHER; note = 2'-O-methyladenosine-3'-phosphate
  modified_base 18: mod_base = OTHER; note = 2'-O-methyladenosine-3'-phosphate
  modified_base 19: mod_base = OTHER; note = 2'-O-methylcytidine-3'-phosphate
  modified_base 20: mod_base = OTHER; note = 2'-O-methyladenosine-3'-phosphate
  modified_base 21: mod_base = OTHER; note = 2'-O-methyluridine-3'-phosphorothioate
  modified_base 22: mod_base = OTHER; note = 2'-O-methyluridine-3'-phosphorothioate
  modified_base 23: mod_base = OTHER; note = 2'-O-methyluridine
tattggcttaatgtagaacattt

SEQ ID NO: 82 - RNA, 23 nt, synthetic construct
  source 1..23: mol_type = other RNA
aaatgttctacattaagccaatt

SEQ ID NO: 83 - RNA, 21 nt, synthetic construct
  source 1..21: mol_type = other RNA
  modified_base 1: mod_base = OTHER; note = 2'-O-methyluridine-3'-phosphorothioate
  modified_base 2: mod_base = OTHER; note = 2'-O-methyluridine-3'-phosphorothioate
  modified_base 3: mod_base = OTHER; note = 2'-O-methylcytidine-3'-phosphate
  modified_base 4: mod_base = OTHER; note = 2'-O-methyluridine-3'-phosphate
  modified_base 5: mod_base = OTHER; note = 2'-O-methyladenosine-3'-phosphate
  modified_base 6: mod_base = OTHER; note = 2'-O-methylcytidine-3'-phosphate
  modified_base 7: mod_base = OTHER; note = 2'-deoxy-2'-fluoroadenosine-3'-phosphate
  modified_base 8: mod_base = OTHER; note = 2'-O-methyluridine-3'-phosphate
  modified_base 9: mod_base = OTHER; note = 2'-deoxy-2'-fluorouridine-3'-phosphate
  modified_base 10: mod_base = OTHER; note = 2'-deoxy-2'-fluoroadenosine-3'-phosphate
  modified_base 11: mod_base = OTHER; note = 2'-deoxy-2'-fluoroadenosine-3'-phosphate
  modified_base 12: mod_base = OTHER; note = 2'-O-methylguanosine-3'-phosphate
  modified_base 13: mod_base = OTHER; note = 2'-O-methylcytidine-3'-phosphate
  modified_base 14: mod_base = OTHER; note = 2'-O-methylcytidine-3'-phosphate
  modified_base 15: mod_base = OTHER; note = 2'-O-methyladenosine-3'-phosphate
  modified_base 16: mod_base = OTHER; note = 2'-O-methyladenosine-3'-phosphate
  modified_base 17: mod_base = OTHER; note = 2'-O-methyluridine-3'-phosphate
  modified_base 18: mod_base = OTHER; note = 2'-O-methyluridine-3'-phosphate
  modified_base 19: mod_base = OTHER; note = 2'-O-methyladenosine-3'-phosphate
  modified_base 20: mod_base = OTHER; note = 2'-O-methyladenosine-3'-phosphate
  modified_base 21: mod_base = OTHER; note = 2'-O-methyladenosine-3'-phosphate ((2S,4R)-1-[29-[[2-(acetylamino)-2-deoxy-beta-D-galactopyra nosyl]oxy]-14,14-bis[[3-[[3-[[5-[[2-(acetylamino)-2-deoxy-b eta-D-galactopyranosyl]oxy]-1-oxopentyl]amino]propyl]amino] -3-oxopropoxy]methyl]-1,12,19,25-tetraoxo-16-oxa-13,20,24-t riazanonacos-1-yl]-4-hydroxy-2-pyrrolidinyl)methyl ester
ttctacattaagccaattaaa

SEQ ID NO: 84 - RNA, 23 nt, synthetic construct
  source 1..23: mol_type = other RNA
  modified_base 1: mod_base = OTHER; note = 2'-O-methyluridine-3'-phosphorothioate 5'-(E)-Vinylphosphonate
  modified_base 2: mod_base = OTHER; note = 2'-deoxy-2'-fluorouridine-3'-phosphorothioate
  modified_base 3: mod_base = OTHER; note = 2'-O-methyluridine-3'-phosphate
  modified_base 4: mod_base = OTHER; note = 2'-O-methyladenosine-3'-phosphate
  modified_base 5: mod_base = OTHER; note = 2'-O-methyladenosine-3'-phosphate
  modified_base 6: mod_base = OTHER; note = 2'-deoxy-2'-fluorouridine-3'-phosphate
  modified_base 7: mod_base = OTHER; note = 2'-O-methyluridine-3'-phosphate
  modified_base 8: mod_base = OTHER; note = 2'-deoxy-2'-fluoroguanosine-3'-phosphate
  modified_base 9: mod_base = OTHER; note = 2'-deoxy-2'-fluoroguanosine-3'-phosphate
  modified_base 10: mod_base = OTHER; note = 2'-O-methylcytidine-3'-phosphate
  modified_base 11: mod_base = OTHER; note = 2'-O-methyluridine-3'-phosphate
  modified_base 12: mod_base = OTHER; note = 2'-O-methyluridine-3'-phosphate
  modified_base 13: mod_base = OTHER; note = 2'-O-methyladenosine-3'-phosphate
  modified_base 14: mod_base = OTHER; note = 2'-deoxy-2'-fluoroadenosine-3'-phosphate
  modified_base 15: mod_base = OTHER; note = 2'-O-methyluridine-3'-phosphate
  modified_base 16: mod_base = OTHER; note = 2'-deoxy-2'-fluoroguanosine-3'-phosphate
  modified_base 17: mod_base = OTHER; note = 2'-O-methyluridine-3'-phosphate
  modified_base 18: mod_base = OTHER; note = 2'-O-methyladenosine-3'-phosphate
  modified_base 19: mod_base = OTHER; note = 2'-O-methylguanosine-3'-phosphate
  modified_base 20: mod_base = OTHER; note = 2'-O-methyladenosine-3'-phosphate
  modified_base 21: mod_base = OTHER; note = 2'-O-methyladenosine-3'-phosphorothioate
  modified_base 22: mod_base = OTHER; note = 2'-O-methylcytidine-3'-phosphorothioate
  modified_base 23: mod_base = OTHER; note = 2'-O-methyladenosine
tttaattggcttaatgtagaaca

SEQ ID NO: 85 - RNA, 23 nt, synthetic construct
  source 1..23: mol_type = other RNA
tgttctacattaagccaattaag

SEQ ID NO: 86 - RNA, 21 nt, synthetic construct
  source 1..21: mol_type = other RNA
  modified_base 1: mod_base = OTHER; note = 2'-O-methyluridine-3'-phosphorothioate
  modified_base 2: mod_base = OTHER; note = 2'-O-methylcytidine-3'-phosphorothioate
  modified_base 3: mod_base = OTHER; note = 2'-O-methyluridine-3'-phosphate
  modified_base 4: mod_base = OTHER; note = 2'-O-methyladenosine-3'-phosphate
  modified_base 5: mod_base = OTHER; note = 2'-O-methylcytidine-3'-phosphate
  modified_base 6: mod_base = OTHER; note = 2'-O-methyladenosine-3'-phosphate
  modified_base 7: mod_base = OTHER; note = 2'-deoxy-2'-fluorouridine-3'-phosphate
  modified_base 8: mod_base = OTHER; note = 2'-O-methyluridine-3'-phosphate
  modified_base 9: mod_base = OTHER; note = 2'-deoxy-2'-fluoroadenosine-3'-phosphate
  modified_base 10: mod_base = OTHER; note = 2'-deoxy-2'-fluoroadenosine-3'-phosphate
  modified_base 11: mod_base = OTHER; note = 2'-deoxy-2'-fluoroguanosine-3'-phosphate
  modified_base 12: mod_base = OTHER; note = 2'-O-methylcytidine-3'-phosphate
  modified_base 13: mod_base = OTHER; note = 2'-O-methylcytidine-3'-phosphate
  modified_base 14: mod_base = OTHER; note = 2'-O-methyladenosine-3'-phosphate
  modified_base 15: mod_base = OTHER; note = 2'-O-methyladenosine-3'-phosphate
  modified_base 16: mod_base = OTHER; note = 2'-O-methyluridine-3'-phosphate
  modified_base 17: mod_base = OTHER; note = 2'-O-methyluridine-3'-phosphate
  modified_base 18: mod_base = OTHER; note = 2'-O-methyladenosine-3'-phosphate
  modified_base 19: mod_base = OTHER; note = 2'-O-methyladenosine-3'-phosphate
  modified_base 20: mod_base = OTHER; note = 2'-O-methylguanosine-3'-phosphate
  modified_base 21: mod_base = OTHER; note = 2'-O-methyladenosine-3'-phosphate ((2S,4R)-1-[29-[[2-(acetylamino)-2-deoxy-beta-D-galactopyra nosyl]oxy]-14,14-bis[[3-[[3-[[5-[[2-(acetylamino)-2-deoxy-b eta-D-galactopyranosyl]oxy]-1-oxopentyl]amino]propyl]amino] -3-oxopropoxy]methyl]-1,12,19,25-tetraoxo-16-oxa-13,20,24-t riazanonacos-1-yl]-4-hydroxy-2-pyrrolidinyl)methyl ester
tctacattaagccaattaaga

SEQ ID NO: 87 - RNA, 23 nt, synthetic construct
  source 1..23: mol_type = other RNA
  modified_base 1: mod_base = OTHER; note = 2'-O-methyluridine-3'-phosphorothioate 5'-(E)-Vinylphosphonate
  modified_base 2: mod_base = OTHER; note = 2'-deoxy-2'-fluorocytidine-3'-phosphorothioate
  modified_base 3: mod_base = OTHER; note = 2'-O-methyluridine-3'-phosphate
  modified_base 4: mod_base = OTHER; note = 2'-O-methyluridine-3'-phosphate
  modified_base 5: mod_base = OTHER; note = 2'-O-methyladenosine-3'-phosphate
  modified_base 6: mod_base = OTHER; note = 2'-deoxy-2'-fluoroadenosine-3'-phosphate
  modified_base 7: mod_base = OTHER; note = 2'-O-methyluridine-3'-phosphate
  modified_base 8: mod_base = OTHER; note = 2'-deoxy-2'-fluorouridine-3'-phosphate
  modified_base 9: mod_base = OTHER; note = 2'-deoxy-2'-fluoroguanosine-3'-phosphate
  modified_base 10: mod_base = OTHER; note = 2'-O-methylguanosine-3'-phosphate
  modified_base 11: mod_base = OTHER; note = 2'-O-methylcytidine-3'-phosphate
  modified_base 12: mod_base = OTHER; note = 2'-O-methyluridine-3'-phosphate
  modified_base 13: mod_base = OTHER; note = 2'-O-methyluridine-3'-phosphate
  modified_base 14: mod_base = OTHER; note = 2'-deoxy-2'-fluoroadenosine-3'-phosphate
  modified_base 15: mod_base = OTHER; note = 2'-O-methyladenosine-3'-phosphate
  modified_base 16: mod_base = OTHER; note = 2'-deoxy-2'-fluorouridine-3'-phosphate
  modified_base 17: mod_base = OTHER; note = 2'-O-methylguanosine-3'-phosphate
  modified_base 18: mod_base = OTHER; note = 2'-O-methyluridine-3'-phosphate
  modified_base 19: mod_base = OTHER; note = 2'-O-methyladenosine-3'-phosphate
  modified_base 20: mod_base = OTHER; note = 2'-O-methylguanosine-3'-phosphate
  modified_base 21: mod_base = OTHER; note = 2'-O-methyladenosine-3'-phosphorothioate
  modified_base 22: mod_base = OTHER; note = 2'-O-methyladenosine-3'-phosphorothioate
  modified_base 23: mod_base = OTHER; note = 2'-O-methylcytidine
tcttaattggcttaatgtagaac

SEQ ID NO: 88 - RNA, 23 nt, synthetic construct
  source 1..23: mol_type = other RNA
gttctacattaagccaattaagt

SEQ ID NO: 89 - RNA, 21 nt, synthetic construct
  source 1..21: mol_type = other RNA
  modified_base 1: mod_base = OTHER; note = 2'-O-methylcytidine-3'-phosphorothioate
  modified_base 2: mod_base = OTHER; note = 2'-O-methyluridine-3'-phosphorothioate
  modified_base 3: mod_base = OTHER; note = 2'-O-methyladenosine-3'-phosphate
  modified_base 4: mod_base = OTHER; note = 2'-O-methylcytidine-3'-phosphate
  modified_base 5: mod_base = OTHER; note = 2'-O-methyladenosine-3'-phosphate
  modified_base 6: mod_base = OTHER; note = 2'-O-methyluridine-3'-phosphate
  modified_base 7: mod_base = OTHER; note = 2'-deoxy-2'-fluorouridine-3'-phosphate
  modified_base 8: mod_base = OTHER; note = 2'-O-methyladenosine-3'-phosphate
  modified_base 9: mod_base = OTHER; note = 2'-deoxy-2'-fluoroadenosine-3'-phosphate
  modified_base 10: mod_base = OTHER; note = 2'-deoxy-2'-fluoroguanosine-3'-phosphate
  modified_base 11: mod_base = OTHER; note = 2'-deoxy-2'-fluorocytidine-3'-phosphate
  modified_base 12: mod_base = OTHER; note = 2'-O-methylcytidine-3'-phosphate
  modified_base 13: mod_base = OTHER; note = 2'-O-methyladenosine-3'-phosphate
  modified_base 14: mod_base = OTHER; note = 2'-O-methyladenosine-3'-phosphate
  modified_base 15: mod_base = OTHER; note = 2'-O-methyluridine-3'-phosphate
  modified_base 16: mod_base = OTHER; note = 2'-O-methyluridine-3'-phosphate
  modified_base 17: mod_base = OTHER; note = 2'-O-methyladenosine-3'-phosphate
  modified_base 18: mod_base = OTHER; note = 2'-O-methyladenosine-3'-phosphate
  modified_base 19: mod_base = OTHER; note = 2'-O-methylguanosine-3'-phosphate
  modified_base 20: mod_base = OTHER; note = 2'-O-methyluridine-3'-phosphate
  modified_base 21: mod_base = OTHER; note = 2'-O-methyladenosine-3'-phosphate ((2S,4R)-1-[29-[[2-(acetylamino)-2-deoxy-beta-D-galactopyra nosyl]oxy]-14,14-bis[[3-[[3-[[5-[[2-(acetylamino)-2-deoxy-b eta-D-galactopyranosyl]oxy]-1-oxopentyl]amino]propyl]amino] -3-oxopropoxy]methyl]-1,12,19,25-tetraoxo-16-oxa-13,20,24-t riazanonacos-1-yl]-4-hydroxy-2-pyrrolidinyl)methyl ester
ctacattaagccaattaagta

SEQ ID NO: 90 - RNA, 23 nt, synthetic construct
  source 1..23: mol_type = other RNA
  modified_base 1: mod_base = OTHER; note = 2'-O-methyluridine-3'-phosphorothioate 5'-(E)-Vinylphosphonate
  modified_base 2: mod_base = OTHER; note = 2'-deoxy-2'-fluoroadenosine-3'-phosphorothioate
  modified_base 3: mod_base = OTHER; note = 2'-O-methylcytidine-3'-phosphate
  modified_base 4: mod_base = OTHER; note = 2'-O-methyluridine-3'-phosphate
  modified_base 5: mod_base = OTHER; note = 2'-O-methyluridine-3'-phosphate
  modified_base 6: mod_base = OTHER; note = 2'-deoxy-2'-fluoroadenosine-3'-phosphate
  modified_base 7: mod_base = OTHER; note = 2'-O-methyladenosine-3'-phosphate
  modified_base 8: mod_base = OTHER; note = 2'-deoxy-2'-fluorouridine-3'-phosphate
  modified_base 9: mod_base = OTHER; note = 2'-deoxy-2'-fluorouridine-3'-phosphate
  modified_base 10: mod_base = OTHER; note = 2'-O-methylguanosine-3'-phosphate
  modified_base 11: mod_base = OTHER; note = 2'-O-methylguanosine-3'-phosphate
  modified_base 12: mod_base = OTHER; note = 2'-O-methylcytidine-3'-phosphate
  modified_base 13: mod_base = OTHER; note = 2'-O-methyluridine-3'-phosphate
  modified_base 14: mod_base = OTHER; note = 2'-deoxy-2'-fluorouridine-3'-phosphate
  modified_base 15: mod_base = OTHER; note = 2'-O-methyladenosine-3'-phosphate
  modified_base 16: mod_base = OTHER; note = 2'-deoxy-2'-fluoroadenosine-3'-phosphate
  modified_base 17: mod_base = OTHER; note = 2'-O-methyluridine-3'-phosphate
  modified_base 18: mod_base = OTHER; note = 2'-O-methylguanosine-3'-phosphate
  modified_base 19: mod_base = OTHER; note = 2'-O-methyluridine-3'-phosphate
  modified_base 20: mod_base = OTHER; note = 2'-O-methyladenosine-3'-phosphate
  modified_base 21: mod_base = OTHER; note = 2'-O-methylguanosine-3'-phosphorothioate
  modified_base 22: mod_base = OTHER; note = 2'-O-methyladenosine-3'-phosphorothioate
  modified_base 23: mod_base = OTHER; note = 2'-O-methyladenosine
tacttaattggcttaatgtagaa

SEQ ID NO: 91 - RNA, 23 nt, synthetic construct
  source 1..23: mol_type = other RNA
ttctacattaagccaattaagta

SEQ ID NO: 92 - RNA, 21 nt, synthetic construct
  source 1..21: mol_type = other RNA
  modified_base 1: mod_base = OTHER; note = 2'-O-methyluridine-3'-phosphorothioate
  modified_base 2: mod_base = OTHER; note = 2'-O-methyladenosine-3'-phosphorothioate
  modified_base 3: mod_base = OTHER; note = 2'-O-methylcytidine-3'-phosphate
  modified_base 4: mod_base = OTHER; note = 2'-O-methyladenosine-3'-phosphate
  modified_base 5: mod_base = OTHER; note = 2'-O-methyluridine-3'-phosphate
  modified_base 6: mod_base = OTHER; note = 2'-O-methyluridine-3'-phosphate
  modified_base 7: mod_base = OTHER; note = 2'-deoxy-2'-fluoroadenosine-3'-phosphate
  modified_base 8: mod_base = OTHER; note = 2'-O-methyladenosine-3'-phosphate
  modified_base 9: mod_base = OTHER; note = 2'-deoxy-2'-fluoroguanosine-3'-phosphate
  modified_base 10: mod_base = OTHER; note = 2'-deoxy-2'-fluorocytidine-3'-phosphate
  modified_base 11: mod_base = OTHER; note = 2'-deoxy-2'-fluorocytidine-3'-phosphate
  modified_base 12: mod_base = OTHER; note = 2'-O-methyladenosine-3'-phosphate
  modified_base 13: mod_base = OTHER; note = 2'-O-methyladenosine-3'-phosphate
  modified_base 14: mod_base = OTHER; note = 2'-O-methyluridine-3'-phosphate
  modified_base 15: mod_base = OTHER; note = 2'-O-methyluridine-3'-phosphate
  modified_base 16: mod_base = OTHER; note = 2'-O-methyladenosine-3'-phosphate
  modified_base 17: mod_base = OTHER; note = 2'-O-methyladenosine-3'-phosphate
  modified_base 18: mod_base = OTHER; note = 2'-O-methylguanosine-3'-phosphate
  modified_base 19: mod_base = OTHER; note = 2'-O-methyluridine-3'-phosphate
  modified_base 20: mod_base = OTHER; note = 2'-O-methyladenosine-3'-phosphate
  modified_base 21: mod_base = OTHER; note = 2'-O-methyladenosine-3'-phosphate ((2S,4R)-1-[29-[[2-(acetylamino)-2-deoxy-beta-D-galactopyra nosyl]oxy]-14,14-bis[[3-[[3-[[5-[[2-(acetylamino)-2-deoxy-b eta-D-galactopyranosyl]oxy]-1-oxopentyl]amino]propyl]amino] -3-oxopropoxy]methyl]-1,12,19,25-tetraoxo-16-oxa-13,20,24-t riazanonacos-1-yl]-4-hydroxy-2-pyrrolidinyl)methyl ester
tacattaagccaattaagtaa

SEQ ID NO: 93 - RNA, 23 nt, synthetic construct
  source 1..23: mol_type = other RNA
  modified_base 1: mod_base = OTHER; note = 2'-O-methyluridine-3'-phosphorothioate 5'-(E)-Vinylphosphonate
  modified_base 2: mod_base = OTHER; note = 2'-deoxy-2'-fluorouridine-3'-phosphorothioate
  modified_base 3: mod_base = OTHER; note = 2'-O-methyladenosine-3'-phosphate
  modified_base 4: mod_base = OTHER; note = 2'-O-methylcytidine-3'-phosphate
  modified_base 5: mod_base = OTHER; note = 2'-O-methyluridine-3'-phosphate
  modified_base 6: mod_base = OTHER; note = 2'-deoxy-2'-fluorouridine-3'-phosphate
  modified_base 7: mod_base = OTHER; note = 2'-O-methyladenosine-3'-phosphate
  modified_base 8: mod_base = OTHER; note = 2'-deoxy-2'-fluoroadenosine-3'-phosphate
  modified_base 9: mod_base = OTHER; note = 2'-deoxy-2'-fluorouridine-3'-phosphate
  modified_base 10: mod_base = OTHER; note = 2'-O-methyluridine-3'-phosphate
  modified_base 11: mod_base = OTHER; note = 2'-O-methylguanosine-3'-phosphate
  modified_base 12: mod_base = OTHER; note = 2'-O-methylguanosine-3'-phosphate
  modified_base 13: mod_base = OTHER; note = 2'-O-methylcytidine-3'-phosphate
  modified_base 14: mod_base = OTHER; note = 2'-deoxy-2'-fluorouridine-3'-phosphate
  modified_base 15: mod_base = OTHER; note = 2'-O-methyluridine-3'-phosphate
  modified_base 16: mod_base = OTHER; note = 2'-deoxy-2'-fluoroadenosine-3'-phosphate
  modified_base 17: mod_base = OTHER; note = 2'-O-methyladenosine-3'-phosphate
  modified_base 18: mod_base = OTHER; note = 2'-O-methyluridine-3'-phosphate
  modified_base 19: mod_base = OTHER; note = 2'-O-methylguanosine-3'-phosphate
  modified_base 20: mod_base = OTHER; note = 2'-O-methyluridine-3'-phosphate
  modified_base 21: mod_base = OTHER; note = 2'-O-methyladenosine-3'-phosphorothioate
  modified_base 22: mod_base = OTHER; note = 2'-O-methylguanosine-3'-phosphorothioate
  modified_base 23: mod_base = OTHER; note = 2'-O-methyladenosine
ttacttaattggcttaatgtaga

SEQ ID NO: 94 - RNA, 23 nt, synthetic construct
  source 1..23: mol_type = other RNA
tctacattaagccaattaagtat

SEQ ID NO: 95 - RNA, 21 nt, synthetic construct
  source 1..21: mol_type = other RNA
  modified_base 1: mod_base = OTHER; note = 2'-O-methylcytidine-3'-phosphorothioate
  modified_base 2: mod_base = OTHER; note = 2'-O-methyladenosine-3'-phosphorothioate
  modified_base 3: mod_base = OTHER; note = 2'-O-methyluridine-3'-phosphate
  modified_base 4: mod_base = OTHER; note = 2'-O-methyluridine-3'-phosphate
  modified_base 5: mod_base = OTHER; note = 2'-O-methyladenosine-3'-phosphate
  modified_base 6: mod_base = OTHER; note = 2'-O-methyladenosine-3'-phosphate
  modified_base 7: mod_base = OTHER; note = 2'-deoxy-2'-fluoroguanosine-3'-phosphate
  modified_base 8: mod_base = OTHER; note = 2'-O-methylcytidine-3'-phosphate
  modified_base 9: mod_base = OTHER; note = 2'-deoxy-2'-fluorocytidine-3'-phosphate
  modified_base 10: mod_base = OTHER; note = 2'-deoxy-2'-fluoroadenosine-3'-phosphate
  modified_base 11: mod_base = OTHER; note = 2'-deoxy-2'-fluoroadenosine-3'-phosphate
  modified_base 12: mod_base = OTHER; note = 2'-O-methyluridine-3'-phosphate
  modified_base 13: mod_base = OTHER; note = 2'-O-methyluridine-3'-phosphate
  modified_base 14: mod_base = OTHER; note = 2'-O-methyladenosine-3'-phosphate
  modified_base 15: mod_base = OTHER; note = 2'-O-methyladenosine-3'-phosphate
  modified_base 16: mod_base = OTHER; note = 2'-O-methylguanosine-3'-phosphate
  modified_base 17: mod_base = OTHER; note = 2'-O-methyluridine-3'-phosphate
  modified_base 18: mod_base = OTHER; note = 2'-O-methyladenosine-3'-phosphate
  modified_base 19: mod_base = OTHER; note = 2'-O-methyluridine-3'-phosphate
  modified_base 20: mod_base = OTHER; note = 2'-O-methyladenosine-3'-phosphate
  modified_base 21: mod_base = OTHER; note = 2'-O-methyladenosine-3'-phosphate ((2S,4R)-1-[29-[[2-(acetylamino)-2-deoxy-beta-D-galactopyra nosyl]oxy]-14,14-bis[[3-[[3-[[5-[[2-(acetylamino)-2-deoxy-b eta-D-galactopyranosyl]oxy]-1-oxopentyl]amino]propyl]amino] -3-oxopropoxy]methyl]-1,12,19,25-tetraoxo-16-oxa-13,20,24-t riazanonacos-1-yl]-4-hydroxy-2-pyrrolidinyl)methyl ester
cattaagccaattaagtataa

SEQ ID NO: 96 - RNA, 23 nt, synthetic construct
  source 1..23: mol_type = other RNA
  modified_base 1: mod_base = OTHER; note = 2'-O-methyluridine-3'-phosphorothioate 5'-(E)-Vinylphosphonate
  modified_base 2: mod_base = OTHER; note = 2'-deoxy-2'-fluorouridine-3'-phosphorothioate
  modified_base 3: mod_base = OTHER; note = 2'-O-methyladenosine-3'-phosphate
  modified_base 4: mod_base = OTHER; note = 2'-O-methyluridine-3'-phosphate
  modified_base 5: mod_base = OTHER; note = 2'-O-methyladenosine-3'-phosphate
  modified_base 6: mod_base = OTHER; note = 2'-deoxy-2'-fluorocytidine-3'-phosphate
  modified_base 7: mod_base = OTHER; note = 2'-O-methyluridine-3'-phosphate
  modified_base 8: mod_base = OTHER; note = 2'-deoxy-2'-fluorouridine-3'-phosphate
  modified_base 9: mod_base = OTHER; note = 2'-deoxy-2'-fluoroadenosine-3'-phosphate
  modified_base 10: mod_base = OTHER; note = 2'-O-methyladenosine-3'-phosphate
  modified_base 11: mod_base = OTHER; note = 2'-O-methyluridine-3'-phosphate
  modified_base 12: mod_base = OTHER; note = 2'-O-methyluridine-3'-phosphate
  modified_base 13: mod_base = OTHER; note = 2'-O-methylguanosine-3'-phosphate
  modified_base 14: mod_base = OTHER; note = 2'-deoxy-2'-fluoroguanosine-3'-phosphate
  modified_base 15: mod_base = OTHER; note = 2'-O-methylcytidine-3'-phosphate
  modified_base 16: mod_base = OTHER; note = 2'-deoxy-2'-fluorouridine-3'-phosphate
  modified_base 17: mod_base = OTHER; note = 2'-O-methyluridine-3'-phosphate
  modified_base 18: mod_base = OTHER; note = 2'-O-methyladenosine-3'-phosphate
  modified_base 19: mod_base = OTHER; note = 2'-O-methyladenosine-3'-phosphate
  modified_base 20: mod_base = OTHER; note = 2'-O-methyluridine-3'-phosphate
  modified_base 21: mod_base = OTHER; note = 2'-O-methylguanosine-3'-phosphorothioate
  modified_base 22: mod_base = OTHER; note = 2'-O-methyluridine-3'-phosphorothioate
  modified_base 23: mod_base = OTHER; note = 2'-O-methyladenosine
ttatacttaattggcttaatgta

SEQ ID NO: 97 - RNA, 23 nt, synthetic construct
  source 1..23: mol_type = other RNA
tacattaagccaattaagtataa

SEQ ID NO: 98 - RNA, 21 nt, synthetic construct
  source 1..21: mol_type = other RNA
  modified_base 1: mod_base = OTHER; note = 2'-O-methyladenosine-3'-phosphorothioate
  modified_base 2: mod_base = OTHER; note = 2'-O-methyluridine-3'-phosphorothioate
  modified_base 3: mod_base = OTHER; note = 2'-O-methyluridine-3'-phosphate
  modified_base 4: mod_base = OTHER; note = 2'-O-methyladenosine-3'-phosphate
  modified_base 5: mod_base = OTHER; note = 2'-O-methyladenosine-3'-phosphate
  modified_base 6: mod_base = OTHER; note = 2'-O-methylguanosine-3'-phosphate
  modified_base 7: mod_base = OTHER; note = 2'-deoxy-2'-fluorocytidine-3'-phosphate
  modified_base 8: mod_base = OTHER; note = 2'-O-methylcytidine-3'-phosphate
  modified_base 9: mod_base = OTHER; note = 2'-deoxy-2'-fluoroadenosine-3'-phosphate
  modified_base 10: mod_base = OTHER; note = 2'-deoxy-2'-fluoroadenosine-3'-phosphate
  modified_base 11: mod_base = OTHER; note = 2'-deoxy-2'-fluorouridine-3'-phosphate
  modified_base 12: mod_base = OTHER; note = 2'-O-methyluridine-3'-phosphate
  modified_base 13: mod_base = OTHER; note = 2'-O-methyladenosine-3'-phosphate
  modified_base 14: mod_base = OTHER; note = 2'-O-methyladenosine-3'-phosphate
  modified_base 15: mod_base = OTHER; note = 2'-O-methylguanosine-3'-phosphate
  modified_base 16: mod_base = OTHER; note = 2'-O-methyluridine-3'-phosphate
  modified_base 17: mod_base = OTHER; note = 2'-O-methyladenosine-3'-phosphate
  modified_base 18: mod_base = OTHER; note = 2'-O-methyluridine-3'-phosphate
  modified_base 19: mod_base = OTHER; note = 2'-O-methyladenosine-3'-phosphate
  modified_base 20: mod_base = OTHER; note = 2'-O-methyladenosine-3'-phosphate
  modified_base 21: mod_base = OTHER; note = 2'-O-methyladenosine-3'-phosphate ((2S,4R)-1-[29-[[2-(acetylamino)-2-deoxy-beta-D-galactopyra nosyl]oxy]-14,14-bis[[3-[[3-[[5-[[2-(acetylamino)-2-deoxy-b eta-D-galactopyranosyl]oxy]-1-oxopentyl]amino]propyl]amino] -3-oxopropoxy]methyl]-1,12,19,25-tetraoxo-16-oxa-13,20,24-t riazanonacos-1-yl]-4-hydroxy-2-pyrrolidinyl)methyl ester
attaagccaattaagtataaa

SEQ ID NO: 99 - RNA, 23 nt, synthetic construct
  source 1..23: mol_type = other RNA
  modified_base 1: mod_base = OTHER; note = 2'-O-methyluridine-3'-phosphorothioate 5'-(E)-Vinylphosphonate
  modified_base 2: mod_base = OTHER; note = 2'-deoxy-2'-fluorouridine-3'-phosphorothioate
  modified_base 3: mod_base = OTHER; note = 2'-O-methyluridine-3'-phosphate
  modified_base 4: mod_base = OTHER; note = 2'-O-methyladenosine-3'-phosphate
  modified_base 5: mod_base = OTHER; note = 2'-O-methyluridine-3'-phosphate
  modified_base 6: mod_base = OTHER; note = 2'-deoxy-2'-fluoroadenosine-3'-phosphate
  modified_base 7: mod_base = OTHER; note = 2'-O-methylcytidine-3'-phosphate
  modified_base 8: mod_base = OTHER; note = 2'-deoxy-2'-fluorouridine-3'-phosphate
  modified_base 9: mod_base = OTHER; note = 2'-deoxy-2'-fluorouridine-3'-phosphate
  modified_base 10: mod_base = OTHER; note = 2'-O-methyladenosine-3'-phosphate
  modified_base 11: mod_base = OTHER; note = 2'-O-methyladenosine-3'-phosphate
  modified_base 12: mod_base = OTHER; note = 2'-O-methyluridine-3'-phosphate
  modified_base 13: mod_base = OTHER; note = 2'-O-methyluridine-3'-phosphate
  modified_base 14: mod_base = OTHER; note = 2'-deoxy-2'-fluoroguanosine-3'-phosphate
  modified_base 15: mod_base = OTHER; note = 2'-O-methylguanosine-3'-phosphate
  modified_base 16: mod_base = OTHER; note = 2'-deoxy-2'-fluorocytidine-3'-phosphate
  modified_base 17: mod_base = OTHER; note = 2'-O-methyluridine-3'-phosphate
  modified_base 18: mod_base = OTHER; note = 2'-O-methyluridine-3'-phosphate
  modified_base 19: mod_base = OTHER; note = 2'-O-methyladenosine-3'-phosphate
  modified_base 20: mod_base = OTHER; note = 2'-O-methyladenosine-3'-phosphate
  modified_base 21: mod_base = OTHER; note = 2'-O-methyluridine-3'-phosphorothioate
  modified_base 22: mod_base = OTHER; note = 2'-O-methylguanosine-3'-phosphorothioate
  modified_base 23: mod_base = OTHER; note = 2'-O-methyluridine
tttatacttaattggcttaatgt

SEQ ID NO: 100 - RNA, 23 nt, synthetic construct
  source 1..23: mol_type = other RNA
acattaagccaattaagtataaa

SEQ ID NO: 101 - RNA, 21 nt, synthetic construct
  source 1..21: mol_type = other RNA
  modified_base 1: mod_base = OTHER; note = 2'-O-methyluridine-3'-phosphorothioate
  modified_base 2: mod_base = OTHER; note = 2'-O-methyluridine-3'-phosphorothioate
  modified_base 3: mod_base = OTHER; note = 2'-O-methyladenosine-3'-phosphate
  modified_base 4: mod_base = OTHER; note = 2'-O-methyladenosine-3'-phosphate
  modified_base 5: mod_base = OTHER; note = 2'-O-methylguanosine-3'-phosphate
  modified_base 6: mod_base = OTHER; note = 2'-O-methylcytidine-3'-phosphate
  modified_base 7: mod_base = OTHER; note = 2'-deoxy-2'-fluorocytidine-3'-phosphate
  modified_base 8: mod_base = OTHER; note = 2'-O-methyladenosine-3'-phosphate
  modified_base 9: mod_base = OTHER; note = 2'-deoxy-2'-fluoroadenosine-3'-phosphate
  modified_base 10: mod_base = OTHER; note = 2'-deoxy-2'-fluorouridine-3'-phosphate
  modified_base 11: mod_base = OTHER; note = 2'-deoxy-2'-fluorouridine-3'-phosphate
  modified_base 12: mod_base = OTHER; note = 2'-O-methyladenosine-3'-phosphate
  modified_base 13: mod_base = OTHER; note = 2'-O-methyladenosine-3'-phosphate
  modified_base 14: mod_base = OTHER; note = 2'-O-methylguanosine-3'-phosphate
  modified_base 15: mod_base = OTHER; note = 2'-O-methyluridine-3'-phosphate
  modified_base 16: mod_base = OTHER; note = 2'-O-methyladenosine-3'-phosphate
  modified_base 17: mod_base = OTHER; note = 2'-O-methyluridine-3'-phosphate
  modified_base 18: mod_base = OTHER; note = 2'-O-methyladenosine-3'-phosphate
  modified_base 19: mod_base = OTHER; note = 2'-O-methyladenosine-3'-phosphate
  modified_base 20: mod_base = OTHER; note = 2'-O-methyladenosine-3'-phosphate
  modified_base 21: mod_base = OTHER; note = 2'-O-methyladenosine-3'-phosphate ((2S,4R)-1-[29-[[2-(acetylamino)-2-deoxy-beta-D-galactopyra nosyl]oxy]-14,14-bis[[3-[[3-[[5-[[2-(acetylamino)-2-deoxy-b eta-D-galactopyranosyl]oxy]-1-oxopentyl]amino]propyl]amino] -3-oxopropoxy]methyl]-1,12,19,25-tetraoxo-16-oxa-13,20,24-t riazanonacos-1-yl]-4-hydroxy-2-pyrrolidinyl)methyl ester
ttaagccaattaagtataaaa

SEQ ID NO: 102 - RNA, 23 nt, synthetic construct
  source 1..23: mol_type = other RNA
  modified_base 1: mod_base = OTHER; note = 2'-O-methyluridine-3'-phosphorothioate 5'-(E)-Vinylphosphonate
  modified_base 2: mod_base = OTHER; note = 2'-deoxy-2'-fluorouridine-3'-phosphorothioate
  modified_base 3: mod_base = OTHER; note = 2'-O-methyluridine-3'-phosphate
  modified_base 4: mod_base = OTHER; note = 2'-O-methyluridine-3'-phosphate
  modified_base 5: mod_base = OTHER; note = 2'-O-methyladenosine-3'-phosphate
  modified_base 6: mod_base = OTHER; note = 2'-deoxy-2'-fluorouridine-3'-phosphate
  modified_base 7: mod_base = OTHER; note = 2'-O-methyladenosine-3'-phosphate
  modified_base 8: mod_base = OTHER; note = 2'-deoxy-2'-fluorocytidine-3'-phosphate
  modified_base 9: mod_base = OTHER; note = 2'-deoxy-2'-fluorouridine-3'-phosphate
  modified_base 10: mod_base = OTHER; note = 2'-O-methyluridine-3'-phosphate
  modified_base 11: mod_base = OTHER; note = 2'-O-methyladenosine-3'-phosphate
  modified_base 12: mod_base = OTHER; note = 2'-O-methyladenosine-3'-phosphate
  modified_base 13: mod_base = OTHER; note = 2'-O-methyluridine-3'-phosphate
  modified_base 14: mod_base = OTHER; note = 2'-deoxy-2'-fluorouridine-3'-phosphate
  modified_base 15: mod_base = OTHER; note = 2'-O-methylguanosine-3'-phosphate
  modified_base 16: mod_base = OTHER; note = 2'-deoxy-2'-fluoroguanosine-3'-phosphate
  modified_base 17: mod_base = OTHER; note = 2'-O-methylcytidine-3'-phosphate
  modified_base 18: mod_base = OTHER; note = 2'-O-methyluridine-3'-phosphate
  modified_base 19: mod_base = OTHER; note = 2'-O-methyluridine-3'-phosphate
  modified_base 20: mod_base = OTHER; note = 2'-O-methyladenosine-3'-phosphate
  modified_base 21: mod_base = OTHER; note = 2'-O-methyladenosine-3'-phosphorothioate
  modified_base 22: mod_base = OTHER; note = 2'-O-methyluridine-3'-phosphorothioate
  modified_base 23: mod_base = OTHER; note = 2'-O-methylguanosine
ttttatacttaattggcttaatg

SEQ ID NO: 103 - RNA, 23 nt, synthetic construct
  source 1..23: mol_type = other RNA
cattaagccaattaagtataaag

SEQ ID NO: 104 - RNA, 21 nt, synthetic construct
  source 1..21: mol_type = other RNA
  modified_base 1: mod_base = OTHER; note = 2'-O-methyluridine-3'-phosphorothioate
  modified_base 2: mod_base = OTHER; note = 2'-O-methyladenosine-3'-phosphorothioate
  modified_base 3: mod_base = OTHER; note = 2'-O-methyladenosine-3'-phosphate
  modified_base 4: mod_base = OTHER; note = 2'-O-methylguanosine-3'-phosphate
  modified_base 5: mod_base = OTHER; note = 2'-O-methylcytidine-3'-phosphate
  modified_base 6: mod_base = OTHER; note = 2'-O-methylcytidine-3'-phosphate
  modified_base 7: mod_base = OTHER; note = 2'-deoxy-2'-fluoroadenosine-3'-phosphate
  modified_base 8: mod_base = OTHER; note = 2'-O-methyladenosine-3'-phosphate
  modified_base 9: mod_base = OTHER; note = 2'-deoxy-2'-fluorouridine-3'-phosphate
  modified_base 10: mod_base = OTHER; note = 2'-deoxy-2'-fluorouridine-3'-phosphate
  modified_base 11: mod_base = OTHER; note = 2'-deoxy-2'-fluoroadenosine-3'-phosphate
  modified_base 12: mod_base = OTHER; note = 2'-O-methyladenosine-3'-phosphate
  modified_base 13: mod_base = OTHER; note = 2'-O-methylguanosine-3'-phosphate
  modified_base 14: mod_base = OTHER; note = 2'-O-methyluridine-3'-phosphate
  modified_base 15: mod_base = OTHER; note = 2'-O-methyladenosine-3'-phosphate
  modified_base 16: mod_base = OTHER; note = 2'-O-methyluridine-3'-phosphate
  modified_base 17: mod_base = OTHER; note = 2'-O-methyladenosine-3'-phosphate
  modified_base 18: mod_base = OTHER; note = 2'-O-methyladenosine-3'-phosphate
  modified_base 19: mod_base = OTHER; note = 2'-O-methyladenosine-3'-phosphate
  modified_base 20: mod_base = OTHER; note = 2'-O-methylguanosine-3'-phosphate
  modified_base 21: mod_base = OTHER; note = 2'-O-methyladenosine-3'-phosphate ((2S,4R)-1-[29-[[2-(acetylamino)-2-deoxy-beta-D-galactopyra nosyl]oxy]-14,14-bis[[3-[[3-[[5-[[2-(acetylamino)-2-deoxy-b eta-D-galactopyranosyl]oxy]-1-oxopentyl]amino]propyl]amino] -3-oxopropoxy]methyl]-1,12,19,25-tetraoxo-16-oxa-13,20,24-t riazanonacos-1-yl]-4-hydroxy-2-pyrrolidinyl)methyl ester
taagccaattaagtataaaga

SEQ ID NO: 105 - RNA, 23 nt, synthetic construct
  source 1..23: mol_type = other RNA
  modified_base 1: mod_base = OTHER; note = 2'-O-methyluridine-3'-phosphorothioate 5'-(E)-Vinylphosphonate
  modified_base 2: mod_base = OTHER; note = 2'-deoxy-2'-fluorocytidine-3'-phosphorothioate
  modified_base 3: mod_base = OTHER; note = 2'-O-methyluridine-3'-phosphate
  modified_base 4: mod_base = OTHER; note = 2'-O-methyluridine-3'-phosphate
  modified_base 5: mod_base = OTHER; note = 2'-O-methyluridine-3'-phosphate
  modified_base 6: mod_base = OTHER; note = 2'-deoxy-2'-fluoroadenosine-3'-phosphate
  modified_base 7: mod_base = OTHER; note = 2'-O-methyluridine-3'-phosphate
  modified_base 8: mod_base = OTHER; note = 2'-deoxy-2'-fluoroadenosine-3'-phosphate
  modified_base 9: mod_base = OTHER; note = 2'-deoxy-2'-fluorocytidine-3'-phosphate
  modified_base 10: mod_base = OTHER; note = 2'-O-methyluridine-3'-phosphate
  modified_base 11: mod_base = OTHER; note = 2'-O-methyluridine-3'-phosphate
  modified_base 12: mod_base = OTHER; note = 2'-O-methyladenosine-3'-phosphate
  modified_base 13: mod_base = OTHER; note = 2'-O-methyladenosine-3'-phosphate
  modified_base 14: mod_base = OTHER; note = 2'-deoxy-2'-fluorouridine-3'-phosphate
  modified_base 15: mod_base = OTHER; note = 2'-O-methyluridine-3'-phosphate
  modified_base 16: mod_base = OTHER; note = 2'-deoxy-2'-fluoroguanosine-3'-phosphate
  modified_base 17: mod_base = OTHER; note = 2'-O-methylguanosine-3'-phosphate
  modified_base 18: mod_base = OTHER; note = 2'-O-methylcytidine-3'-phosphate
  modified_base 19: mod_base = OTHER; note = 2'-O-methyluridine-3'-phosphate
  modified_base 20: mod_base = OTHER; note = 2'-O-methyluridine-3'-phosphate
  modified_base 21: mod_base = OTHER; note = 2'-O-methyladenosine-3'-phosphorothioate
  modified_base 22: mod_base = OTHER; note = 2'-O-methyladenosine-3'-phosphorothioate
  modified_base 23: mod_base = OTHER; note = 2'-O-methyluridine
tctttatacttaattggcttaat

SEQ ID NO: 106 - RNA, 23 nt, synthetic construct
  source 1..23: mol_type = other RNA
attaagccaattaagtataaagg

SEQ ID NO: 107 - RNA, 21 nt, synthetic construct
  source 1..21: mol_type = other RNA
  modified_base 1: mod_base = OTHER; note = 2'-O-methyladenosine-3'-phosphorothioate
  modified_base 2: mod_base = OTHER; note = 2'-O-methyladenosine-3'-phosphorothioate
  modified_base 3: mod_base = OTHER; note = 2'-O-methylguanosine-3'-phosphate
  modified_base 4: mod_base = OTHER; note = 2'-O-methylcytidine-3'-phosphate
  modified_base 5: mod_base = OTHER; note = 2'-O-methylcytidine-3'-phosphate
  modified_base 6: mod_base = OTHER; note = 2'-O-methyladenosine-3'-phosphate
  modified_base 7: mod_base = OTHER; note = 2'-deoxy-2'-fluoroadenosine-3'-phosphate
  modified_base 8: mod_base = OTHER; note = 2'-O-methyluridine-3'-phosphate
  modified_base 9: mod_base = OTHER; note = 2'-deoxy-2'-fluorouridine-3'-phosphate
  modified_base 10: mod_base = OTHER; note = 2'-deoxy-2'-fluoroadenosine-3'-phosphate
  modified_base 11: mod_base = OTHER; note = 2'-deoxy-2'-fluoroadenosine-3'-phosphate
  modified_base 12: mod_base = OTHER; note = 2'-O-methylguanosine-3'-phosphate
  modified_base 13: mod_base = OTHER; note = 2'-O-methyluridine-3'-phosphate
  modified_base 14: mod_base = OTHER; note = 2'-O-methyladenosine-3'-phosphate
  modified_base 15: mod_base = OTHER; note = 2'-O-methyluridine-3'-phosphate
  modified_base 16: mod_base = OTHER; note = 2'-O-methyladenosine-3'-phosphate
  modified_base 17: mod_base = OTHER; note = 2'-O-methyladenosine-3'-phosphate
  modified_base 18: mod_base = OTHER; note = 2'-O-methyladenosine-3'-phosphate
  modified_base 19: mod_base = OTHER; note = 2'-O-methylguanosine-3'-phosphate
  modified_base 20: mod_base = OTHER; note = 2'-O-methylguanosine-3'-phosphate
  modified_base 21: mod_base = OTHER; note = 2'-O-methyladenosine-3'-phosphate ((2S,4R)-1-[29-[[2-(acetylamino)-2-deoxy-beta-D-galactopyra nosyl]oxy]-14,14-bis[[3-[[3-[[5-[[2-(acetylamino)-2-deoxy-b eta-D-galactopyranosyl]oxy]-1-oxopentyl]amino]propyl]amino] -3-oxopropoxy]methyl]-1,12,19,25-tetraoxo-16-oxa-13,20,24-t riazanonacos-1-yl]-4-hydroxy-2-pyrrolidinyl)methyl ester
aagccaattaagtataaagga

SEQ ID NO: 108 - RNA, 23 nt, synthetic construct
  source 1..23: mol_type = other RNA
  modified_base 1: mod_base = OTHER; note = 2'-O-methyluridine-3'-phosphorothioate 5'-(E)-Vinylphosphonate
  modified_base 2: mod_base = OTHER; note = 2'-deoxy-2'-fluorocytidine-3'-phosphorothioate
  modified_base 3: mod_base = OTHER; note = 2'-O-methylcytidine-3'-phosphate
  modified_base 4: mod_base = OTHER; note = 2'-O-methyluridine-3'-phosphate
  modified_base 5: mod_base = OTHER; note = 2'-O-methyluridine-3'-phosphate
  modified_base 6: mod_base = OTHER; note = 2'-deoxy-2'-fluorouridine-3'-phosphate
  modified_base 7: mod_base = OTHER; note = 2'-O-methyladenosine-3'-phosphate
  modified_base 8: mod_base = OTHER; note = 2'-deoxy-2'-fluorouridine-3'-phosphate
  modified_base 9: mod_base = OTHER; note = 2'-deoxy-2'-fluoroadenosine-3'-phosphate
  modified_base 10: mod_base = OTHER; note = 2'-O-methylcytidine-3'-phosphate
  modified_base 11: mod_base = OTHER; note = 2'-O-methyluridine-3'-phosphate
  modified_base 12: mod_base = OTHER; note = 2'-O-methyluridine-3'-phosphate
  modified_base 13: mod_base = OTHER; note = 2'-O-methyladenosine-3'-phosphate
  modified_base 14: mod_base = OTHER; note = 2'-deoxy-2'-fluoroadenosine-3'-phosphate
  modified_base 15: mod_base = OTHER; note = 2'-O-methyluridine-3'-phosphate
  modified_base 16: mod_base = OTHER; note = 2'-deoxy-2'-fluorouridine-3'-phosphate
  modified_base 17: mod_base = OTHER; note = 2'-O-methylguanosine-3'-phosphate
  modified_base 18: mod_base = OTHER; note = 2'-O-methylguanosine-3'-phosphate
  modified_base 19: mod_base = OTHER; note = 2'-O-methylcytidine-3'-phosphate
  modified_base 20: mod_base = OTHER; note = 2'-O-methyluridine-3'-phosphate
  modified_base 21: mod_base = OTHER; note = 2'-O-methyluridine-3'-phosphorothioate
  modified_base 22: mod_base = OTHER; note = 2'-O-methyladenosine-3'-phosphorothioate
  modified_base 23: mod_base = OTHER; note = 2'-O-methyladenosine
tcctttatacttaattggcttaa

SEQ ID NO: 109 - RNA, 23 nt, synthetic construct
  source 1..23: mol_type = other RNA
ttaagccaattaagtataaaggt

SEQ ID NO: 110 - RNA, 21 nt, synthetic construct
  source 1..21: mol_type = other RNA
  modified_base 1: mod_base = OTHER; note = 2'-O-methyladenosine-3'-phosphorothioate
  modified_base 2: mod_base = OTHER; note = 2'-O-methylguanosine-3'-phosphorothioate
  modified_base 3: mod_base = OTHER; note = 2'-O-methylcytidine-3'-phosphate
  modified_base 4: mod_base = OTHER; note = 2'-O-methylcytidine-3'-phosphate
  modified_base 5: mod_base = OTHER; note = 2'-O-methyladenosine-3'-phosphate
  modified_base 6: mod_base = OTHER; note = 2'-O-methyladenosine-3'-phosphate
  modified_base 7: mod_base = OTHER; note = 2'-deoxy-2'-fluorouridine-3'-phosphate
  modified_base 8: mod_base = OTHER; note = 2'-O-methyluridine-3'-phosphate
  modified_base 9: mod_base = OTHER; note = 2'-deoxy-2'-fluoroadenosine-3'-phosphate
  modified_base 10: mod_base = OTHER; note = 2'-deoxy-2'-fluoroadenosine-3'-phosphate
  modified_base 11: mod_base = OTHER; note = 2'-deoxy-2'-fluoroguanosine-3'-phosphate
  modified_base 12: mod_base = OTHER; note = 2'-O-methyluridine-3'-phosphate
  modified_base 13: mod_base = OTHER; note = 2'-O-methyladenosine-3'-phosphate
  modified_base 14: mod_base = OTHER; note = 2'-O-methyluridine-3'-phosphate
  modified_base 15: mod_base = OTHER; note = 2'-O-methyladenosine-3'-phosphate
  modified_base 16: mod_base = OTHER; note = 2'-O-methyladenosine-3'-phosphate
  modified_base 17: mod_base = OTHER; note = 2'-O-methyladenosine-3'-phosphate
  modified_base 18: mod_base = OTHER; note = 2'-O-methylguanosine-3'-phosphate
  modified_base 19: mod_base = OTHER; note = 2'-O-methylguanosine-3'-phosphate
  modified_base 20: mod_base = OTHER; note = 2'-O-methyluridine-3'-phosphate
  modified_base 21: mod_base = OTHER; note = 2'-O-methyladenosine-3'-phosphate ((2S,4R)-1-[29-[[2-(acetylamino)-2-deoxy-beta-D-galactopyra nosyl]oxy]-14,14-bis[[3-[[3-[[5-[[2-(acetylamino)-2-deoxy-b eta-D-galactopyranosyl]oxy]-1-oxopentyl]amino]propyl]amino] -3-oxopropoxy]methyl]-1,12,19,25-tetraoxo-16-oxa-13,20,24-t riazanonacos-1-yl]-4-hydroxy-2-pyrrolidinyl)methyl ester
agccaattaagtataaaggta

SEQ ID NO: 111 - RNA, 23 nt, synthetic construct
  source 1..23: mol_type = other RNA
  modified_base 1: mod_base = OTHER; note = 2'-O-methyluridine-3'-phosphorothioate 5'-(E)-Vinylphosphonate
  modified_base 2: mod_base = OTHER; note = 2'-deoxy-2'-fluoroadenosine-3'-phosphorothioate
  modified_base 3: mod_base = OTHER; note = 2'-O-methylcytidine-3'-phosphate
  modified_base 4: mod_base = OTHER; note = 2'-O-methylcytidine-3'-phosphate
  modified_base 5: mod_base = OTHER; note = 2'-O-methyluridine-3'-phosphate
  modified_base 6: mod_base = OTHER; note = 2'-deoxy-2'-fluorouridine-3'-phosphate
  modified_base 7: mod_base = OTHER; note = 2'-O-methyluridine-3'-phosphate
  modified_base 8: mod_base = OTHER; note = 2'-deoxy-2'-fluoroadenosine-3'-phosphate
  modified_base 9: mod_base = OTHER; note = 2'-deoxy-2'-fluorouridine-3'-phosphate
  modified_base 10: mod_base = OTHER; note = 2'-O-methyladenosine-3'-phosphate
  modified_base 11: mod_base = OTHER; note = 2'-O-methylcytidine-3'-phosphate
  modified_base 12: mod_base = OTHER; note = 2'-O-methyluridine-3'-phosphate
  modified_base 13: mod_base = OTHER; note = 2'-O-methyluridine-3'-phosphate
  modified_base 14: mod_base = OTHER; note = 2'-deoxy-2'-fluoroadenosine-3'-phosphate
  modified_base 15: mod_base = OTHER; note = 2'-O-methyladenosine-3'-phosphate
  modified_base 16: mod_base = OTHER; note = 2'-deoxy-2'-fluorouridine-3'-phosphate
  modified_base 17: mod_base = OTHER; note = 2'-O-methyluridine-3'-phosphate
  modified_base 18: mod_base = OTHER; note = 2'-O-methylguanosine-3'-phosphate
  modified_base 19: mod_base = OTHER; note = 2'-O-methylguanosine-3'-phosphate
  modified_base 20: mod_base = OTHER; note = 2'-O-methylcytidine-3'-phosphate
  modified_base 21: mod_base = OTHER; note = 2'-O-methyluridine-3'-phosphorothioate
  modified_base 22: mod_base = OTHER; note = 2'-O-methyluridine-3'-phosphorothioate
  modified_base 23: mod_base = OTHER; note = 2'-O-methyladenosine
tacctttatacttaattggctta

SEQ ID NO: 112 - RNA, 23 nt, synthetic construct
  source 1..23: mol_type = other RNA
taagccaattaagtataaaggtc

SEQ ID NO: 113 - RNA, 21 nt, synthetic construct
  source 1..21: mol_type = other RNA
  modified_base 1: mod_base = OTHER; note = 2'-O-methyladenosine-3'-phosphorothioate
  modified_base 2: mod_base = OTHER; note = 2'-O-methylcytidine-3'-phosphorothioate
  modified_base 3: mod_base = OTHER; note = 2'-O-methyluridine-3'-phosphate
  modified_base 4: mod_base = OTHER; note = 2'-O-methyluridine-3'-phosphate
  modified_base 5: mod_base = OTHER; note = 2'-O-methylguanosine-3'-phosphate
  modified_base 6: mod_base = OTHER; note = 2'-O-methylguanosine-3'-phosphate
  modified_base 7: mod_base = OTHER; note = 2'-deoxy-2'-fluoroadenosine-3'-phosphate
  modified_base 8: mod_base = OTHER; note = 2'-O-methyladenosine-3'-phosphate
  modified_base 9: mod_base = OTHER; note = 2'-deoxy-2'-fluorocytidine-3'-phosphate
  modified_base 10: mod_base = OTHER; note = 2'-deoxy-2'-fluorouridine-3'-phosphate
  modified_base 11: mod_base = OTHER; note = 2'-deoxy-2'-fluorocytidine-3'-phosphate
  modified_base 12: mod_base = OTHER; note = 2'-O-methyluridine-3'-phosphate
  modified_base 13: mod_base = OTHER; note = 2'-O-methyladenosine-3'-phosphate
  modified_base 14: mod_base = OTHER; note = 2'-O-methyluridine-3'-phosphate
  modified_base 15: mod_base = OTHER; note = 2'-O-methyluridine-3'-phosphate
  modified_base 16: mod_base = OTHER; note = 2'-O-methylguanosine-3'-phosphate
  modified_base 17: mod_base = OTHER; note = 2'-O-methylcytidine-3'-phosphate
  modified_base 18: mod_base = OTHER; note = 2'-O-methylcytidine-3'-phosphate
  modified_base 19: mod_base = OTHER; note = 2'-O-methylcytidine-3'-phosphate
  modified_base 20: mod_base = OTHER; note = 2'-O-methyluridine-3'-phosphate
  modified_base 21: mod_base = OTHER; note = 2'-O-methyladenosine-3'-phosphate ((2S,4R)-1-[29-[[2-(acetylamino)-2-deoxy-beta-D-galactopyra nosyl]oxy]-14,14-bis[[3-[[3-[[5-[[2-(acetylamino)-2-deoxy-b eta-D-galactopyranosyl]oxy]-1-oxopentyl]amino]propyl]amino] -3-oxopropoxy]methyl]-1,12,19,25-tetraoxo-16-oxa-13,20,24-t riazanonacos-1-yl]-4-hydroxy-2-pyrrolidinyl)methyl ester
acttggaactctattgcccta

SEQ ID NO: 114 - RNA, 23 nt, synthetic construct
  source 1..23: mol_type = other RNA
  modified_base 1: mod_base = OTHER; note = 2'-O-methyluridine-3'-phosphorothioate 5'-(E)-Vinylphosphonate
  modified_base 2: mod_base = OTHER; note = 2'-deoxy-2'-fluoroadenosine-3'-phosphorothioate
  modified_base 3: mod_base = OTHER; note = 2'-O-methylguanosine-3'-phosphate
  modified_base 4: mod_base = OTHER; note = 2'-O-methylguanosine-3'-phosphate
  modified_base 5: mod_base = OTHER; note = 2'-O-methylguanosine-3'-phosphate
  modified_base 6: mod_base = OTHER; note = 2'-deoxy-2'-fluorocytidine-3'-phosphate
  modified_base 7: mod_base = OTHER; note = 2'-O-methyladenosine-3'-phosphate
  modified_base 8: mod_base = OTHER; note = 2'-deoxy-2'-fluoroadenosine-3'-phosphate
  modified_base 9: mod_base = OTHER; note = 2'-deoxy-2'-fluorouridine-3'-phosphate
  modified_base 10: mod_base = OTHER; note = 2'-O-methyladenosine-3'-phosphate
  modified_base 11: mod_base = OTHER; note = 2'-O-methylguanosine-3'-phosphate
  modified_base 12: mod_base = OTHER; note = 2'-O-methyladenosine-3'-phosphate
  modified_base 13: mod_base = OTHER; note = 2'-O-methylguanosine-3'-phosphate
  modified_base 14: mod_base = OTHER; note = 2'-deoxy-2'-fluorouridine-3'-phosphate
  modified_base 15: mod_base = OTHER; note = 2'-O-methyluridine-3'-phosphate
  modified_base 16: mod_base = OTHER; note = 2'-deoxy-2'-fluorocytidine-3'-phosphate
  modified_base 17: mod_base = OTHER; note = 2'-O-methylcytidine-3'-phosphate
  modified_base 18: mod_base = OTHER; note = 2'-O-methyladenosine-3'-phosphate
  modified_base 19: mod_base = OTHER; note = 2'-O-methyladenosine-3'-phosphate
  modified_base 20: mod_base = OTHER; note = 2'-O-methylguanosine-3'-phosphate
  modified_base 21: mod_base = OTHER; note = 2'-O-methyluridine-3'-phosphorothioate
  modified_base 22: mod_base = OTHER; note = 2'-O-methyluridine-3'-phosphorothioate
  modified_base 23: mod_base = OTHER; note = 2'-O-methyluridine
tagggcaatagagttccaagttt

SEQ ID NO: 115 - RNA, 23 nt, synthetic construct
  source 1..23: mol_type = other RNA
aaacttggaactctattgccctt

SEQ ID NO: 116 - RNA, 21 nt, synthetic construct
  source 1..21: mol_type = other RNA
  modified_base 1: mod_base = OTHER; note = 2'-O-methyluridine-3'-phosphorothioate
  modified_base 2: mod_base = OTHER; note = 2'-O-methyluridine-3'-phosphorothioate
  modified_base 3: mod_base = OTHER; note = 2'-O-methylguanosine-3'-phosphate
  modified_base 4: mod_base = OTHER; note = 2'-O-methylguanosine-3'-phosphate
  modified_base 5: mod_base = OTHER; note = 2'-O-methyladenosine-3'-phosphate
  modified_base 6: mod_base = OTHER; note = 2'-O-methyladenosine-3'-phosphate
  modified_base 7: mod_base = OTHER; note = 2'-deoxy-2'-fluorocytidine-3'-phosphate
  modified_base 8: mod_base = OTHER; note = 2'-O-methyluridine-3'-phosphate
  modified_base 9: mod_base = OTHER; note = 2'-deoxy-2'-fluorocytidine-3'-phosphate
  modified_base 10: mod_base = OTHER; note = 2'-deoxy-2'-fluorouridine-3'-phosphate
  modified_base 11: mod_base = OTHER; note = 2'-deoxy-2'-fluoroadenosine-3'-phosphate
  modified_base 12: mod_base = OTHER; note = 2'-O-methyluridine-3'-phosphate
  modified_base 13: mod_base = OTHER; note = 2'-O-methyluridine-3'-phosphate
  modified_base 14: mod_base = OTHER; note = 2'-O-methylguanosine-3'-phosphate
  modified_base 15: mod_base = OTHER; note = 2'-O-methylcytidine-3'-phosphate
  modified_base 16: mod_base = OTHER; note = 2'-O-methylcytidine-3'-phosphate
  modified_base 17: mod_base = OTHER; note = 2'-O-methylcytidine-3'-phosphate
  modified_base 18: mod_base = OTHER; note = 2'-O-methyluridine-3'-phosphate
  modified_base 19: mod_base = OTHER; note = 2'-O-methyluridine-3'-phosphate
  modified_base 20: mod_base = OTHER; note = 2'-O-methylguanosine-3'-phosphate
  modified_base 21: mod_base = OTHER; note = 2'-O-methyladenosine-3'-phosphate ((2S,4R)-1-[29-[[2-(acetylamino)-2-deoxy-beta-D-galactopyra nosyl]oxy]-14,14-bis[[3-[[3-[[5-[[2-(acetylamino)-2-deoxy-b eta-D-galactopyranosyl]oxy]-1-oxopentyl]amino]propyl]amino] -3-oxopropoxy]methyl]-1,12,19,25-tetraoxo-16-oxa-13,20,24-t riazanonacos-1-yl]-4-hydroxy-2-pyrrolidinyl)methyl ester
ttggaactctattgcccttga

SEQ ID NO: 117 - RNA, 23 nt, synthetic construct
  source 1..23: mol_type = other RNA
  modified_base 1: mod_base = OTHER; note = 2'-O-methyluridine-3'-phosphorothioate 5'-(E)-Vinylphosphonate
  modified_base 2: mod_base = OTHER; note = 2'-deoxy-2'-fluorocytidine-3'-phosphorothioate
  modified_base 3: mod_base = OTHER; note = 2'-O-methyladenosine-3'-phosphate
  modified_base 4: mod_base = OTHER; note = 2'-O-methyladenosine-3'-phosphate
  modified_base 5: mod_base = OTHER; note = 2'-O-methylguanosine-3'-phosphate
  modified_base 6: mod_base = OTHER; note = 2'-deoxy-2'-fluoroguanosine-3'-phosphate
  modified_base 7: mod_base = OTHER; note = 2'-O-methylguanosine-3'-phosphate
  modified_base 8: mod_base = OTHER; note = 2'-deoxy-2'-fluorocytidine-3'-phosphate
  modified_base 9: mod_base = OTHER; note = 2'-deoxy-2'-fluoroadenosine-3'-phosphate
  modified_base 10: mod_base = OTHER; note = 2'-O-methyladenosine-3'-phosphate
  modified_base 11: mod_base = OTHER; note = 2'-O-methyluridine-3'-phosphate
  modified_base 12: mod_base = OTHER; note = 2'-O-methyladenosine-3'-phosphate
  modified_base 13: mod_base = OTHER; note = 2'-O-methylguanosine-3'-phosphate
  modified_base 14: mod_base = OTHER; note = 2'-deoxy-2'-fluoroadenosine-3'-phosphate
  modified_base 15: mod_base = OTHER; note = 2'-O-methylguanosine-3'-phosphate
  modified_base 16: mod_base = OTHER; note = 2'-deoxy-2'-fluorouridine-3'-phosphate
  modified_base 17: mod_base = OTHER; note = 2'-O-methyluridine-3'-phosphate
  modified_base 18: mod_base = OTHER; note = 2'-O-methylcytidine-3'-phosphate
  modified_base 19: mod_base = OTHER; note = 2'-O-methylcytidine-3'-phosphate
  modified_base 20: mod_base = OTHER; note = 2'-O-methyladenosine-3'-phosphate
  modified_base 21: mod_base = OTHER; note = 2'-O-methyladenosine-3'-phosphorothioate
  modified_base 22: mod_base = OTHER; note = 2'-O-methylguanosine-3'-phosphorothioate
  modified_base 23: mod_base = OTHER; note = 2'-O-methyluridine
tcaagggcaatagagttccaagt

SEQ ID NO: 118 - RNA, 23 nt, synthetic construct
  source 1..23: mol_type = other RNA
acttggaactctattgcccttgc

SEQ ID NO: 119 - RNA, 21 nt, synthetic construct
  source 1..21: mol_type = other RNA
  modified_base 1: mod_base = OTHER; note = 2'-O-methylguanosine-3'-phosphorothioate
  modified_base 2: mod_base = OTHER; note = 2'-O-methylcytidine-3'-phosphorothioate
  modified_base 3: mod_base = OTHER; note = 2'-O-methylcytidine-3'-phosphate
  modified_base 4: mod_base = OTHER; note = 2'-O-methylcytidine-3'-phosphate
  modified_base 5: mod_base = OTHER; note = 2'-O-methyluridine-3'-phosphate
  modified_base 6: mod_base = OTHER; note = 2'-O-methyluridine-3'-phosphate
  modified_base 7: mod_base = OTHER; note = 2'-deoxy-2'-fluoroguanosine-3'-phosphate
  modified_base 8: mod_base = OTHER; note = 2'-O-methylcytidine-3'-phosphate
  modified_base 9: mod_base = OTHER; note = 2'-deoxy-2'-fluoroadenosine-3'-phosphate
  modified_base 10: mod_base = OTHER; note = 2'-deoxy-2'-fluoroguanosine-3'-phosphate
  modified_base 11: mod_base = OTHER; note = 2'-deoxy-2'-fluoroadenosine-3'-phosphate
  modified_base 12: mod_base = OTHER; note = 2'-O-methyladenosine-3'-phosphate
  modified_base 13: mod_base = OTHER; note = 2'-O-methyladenosine-3'-phosphate
  modified_base 14: mod_base = OTHER; note = 2'-O-methylguanosine-3'-phosphate
  modified_base 15: mod_base = OTHER; note = 2'-O-methyluridine-3'-phosphate
  modified_base 16: mod_base = OTHER; note = 2'-O-methyluridine-3'-phosphate
  modified_base 17: mod_base = OTHER; note = 2'-O-methyluridine-3'-phosphate
  modified_base 18: mod_base = OTHER; note = 2'-O-methyladenosine-3'-phosphate
  modified_base 19: mod_base = OTHER; note = 2'-O-methyluridine-3'-phosphate
  modified_base 20: mod_base = OTHER; note = 2'-O-methylcytidine-3'-phosphate
  modified_base 21: mod_base = OTHER; note = 2'-O-methyladenosine-3'-phosphate ((2S,4R)-1-[29-[[2-(acetylamino)-2-deoxy-beta-D-galactopyra nosyl]oxy]-14,14-bis[[3-[[3-[[5-[[2-(acetylamino)-2-deoxy-b eta-D-galactopyranosyl]oxy]-1-oxopentyl]amino]propyl]amino] -3-oxopropoxy]methyl]-1,12,19,25-tetraoxo-16-oxa-13,20,24-t riazanonacos-1-yl]-4-hydroxy-2-pyrrolidinyl)methyl ester
gcccttgcagaaagtttatca

SEQ ID NO: 120 - RNA, 23 nt, synthetic construct
  source 1..23: mol_type = other RNA
  modified_base 1: mod_base = OTHER; note = 2'-O-methyluridine-3'-phosphorothioate 5'-(E)-Vinylphosphonate
  modified_base 2: mod_base = OTHER; note = 2'-deoxy-2'-fluoroguanosine-3'-phosphorothioate
  modified_base 3: mod_base = OTHER; note = 2'-O-methyladenosine-3'-phosphate
  modified_base 4: mod_base = OTHER; note = 2'-O-methyluridine-3'-phosphate
  modified_base 5: mod_base = OTHER; note = 2'-O-methyladenosine-3'-phosphate
  modified_base 6: mod_base = OTHER; note = 2'-deoxy-2'-fluoroadenosine-3'-phosphate
  modified_base 7: mod_base = OTHER; note = 2'-O-methyladenosine-3'-phosphate
  modified_base 8: mod_base = OTHER; note = 2'-deoxy-2'-fluorocytidine-3'-phosphate
  modified_base 9: mod_base = OTHER; note = 2'-deoxy-2'-fluorouridine-3'-phosphate
  modified_base 10: mod_base = OTHER; note = 2'-O-methyluridine-3'-phosphate
  modified_base 11: mod_base = OTHER; note = 2'-O-methyluridine-3'-phosphate
  modified_base 12: mod_base = OTHER; note = 2'-O-methylcytidine-3'-phosphate
  modified_base 13: mod_base = OTHER; note = 2'-O-methyluridine-3'-phosphate
  modified_base 14: mod_base = OTHER; note = 2'-deoxy-2'-fluoroguanosine-3'-phosphate
  modified_base 15: mod_base = OTHER; note = 2'-O-methylcytidine-3'-phosphate
  modified_base 16: mod_base = OTHER; note = 2'-deoxy-2'-fluoroadenosine-3'-phosphate
  modified_base 17: mod_base = OTHER; note = 2'-O-methyladenosine-3'-phosphate
  modified_base 18: mod_base = OTHER; note = 2'-O-methylguanosine-3'-phosphate
  modified_base 19: mod_base = OTHER; note = 2'-O-methylguanosine-3'-phosphate
  modified_base 20: mod_base = OTHER; note = 2'-O-methylguanosine-3'-phosphate
  modified_base 21: mod_base = OTHER; note = 2'-O-methylcytidine-3'-phosphorothioate
  modified_base 22: mod_base = OTHER; note = 2'-O-methyladenosine-3'-phosphorothioate
  modified_base 23: mod_base = OTHER; note = 2'-O-methyladenosine
tgataaactttctgcaagggcaa

SEQ ID NO: 121 - RNA, 23 nt, synthetic construct
  source 1..23: mol_type = other RNA
ttgcccttgcagaaagtttatcc

SEQ ID NO: 122 - RNA, 21 nt, synthetic construct
  source 1..21: mol_type = other RNA
  modified_base 1: mod_base = OTHER; note = 2'-O-methyluridine-3'-phosphorothioate
  modified_base 2: mod_base = OTHER; note = 2'-O-methylcytidine-3'-phosphorothioate
  modified_base 3: mod_base = OTHER; note = 2'-O-methylguanosine-3'-phosphate
  modified_base 4: mod_base = OTHER; note = 2'-O-methylcytidine-3'-phosphate
  modified_base 5: mod_base = OTHER; note = 2'-O-methyladenosine-3'-phosphate
  modified_base 6: mod_base = OTHER; note = 2'-O-methyluridine-3'-phosphate
  modified_base 7: mod_base = OTHER; note = 2'-deoxy-2'-fluoroguanosine-3'-phosphate
  modified_base 8: mod_base = OTHER; note = 2'-O-methyluridine-3'-phosphate
  modified_base 9: mod_base = OTHER; note = 2'-deoxy-2'-fluoroguanosine-3'-phosphate
  modified_base 10: mod_base = OTHER; note = 2'-deoxy-2'-fluorocytidine-3'-phosphate
  modified_base 11: mod_base = OTHER; note = 2'-deoxy-2'-fluoroadenosine-3'-phosphate
  modified_base 12: mod_base = OTHER; note = 2'-O-methylcytidine-3'-phosphate
  modified_base 13: mod_base = OTHER; note = 2'-O-methyladenosine-3'-phosphate
  modified_base 14: mod_base = OTHER; note = 2'-O-methyluridine-3'-phosphate
  modified_base 15: mod_base = OTHER; note = 2'-O-methyluridine-3'-phosphate
  modified_base 16: mod_base = OTHER; note = 2'-O-methylguanosine-3'-phosphate
  modified_base 17: mod_base = OTHER; note = 2'-O-methyladenosine-3'-phosphate
  modified_base 18: mod_base = OTHER; note = 2'-O-methyladenosine-3'-phosphate
  modified_base 19: mod_base = OTHER; note = 2'-O-methyladenosine-3'-phosphate
  modified_base 20: mod_base = OTHER; note = 2'-O-methyladenosine-3'-phosphate
  modified_base 21: mod_base = OTHER; note = 2'-O-methyladenosine-3'-phosphate ((2S,4R)-1-[29-[[2-(acetylamino)-2-deoxy-beta-D-galactopyra nosyl]oxy]-14,14-bis[[3-[[3-[[5-[[2-(acetylamino)-2-deoxy-b eta-D-galactopyranosyl]oxy]-1-oxopentyl]amino]propyl]amino] -3-oxopropoxy]methyl]-1,12,19,25-tetraoxo-16-oxa-13,20,24-t riazanonacos-1-yl]-4-hydroxy-2-pyrrolidinyl)methyl ester
tcgcatgtgcacattgaaaaa

SEQ ID NO: 123 - RNA, 23 nt, synthetic construct
  source 1..23: mol_type = other RNA
  modified_base 1: mod_base = OTHER; note = 2'-O-methyluridine-3'-phosphorothioate 5'-(E)-Vinylphosphonate
  modified_base 2: mod_base = OTHER; note = 2'-deoxy-2'-fluorouridine-3'-phosphorothioate
  modified_base 3: mod_base = OTHER; note = 2'-O-methyluridine-3'-phosphate
  modified_base 4: mod_base = OTHER; note = 2'-O-methyluridine-3'-phosphate
  modified_base 5: mod_base = OTHER; note = 2'-O-methyluridine-3'-phosphate
  modified_base 6: mod_base = OTHER; note = 2'-deoxy-2'-fluorocytidine-3'-phosphate
  modified_base 7: mod_base = OTHER; note = 2'-O-methyladenosine-3'-phosphate
  modified_base 8: mod_base = OTHER; note = 2'-deoxy-2'-fluoroadenosine-3'-phosphate
  modified_base 9: mod_base = OTHER; note = 2'-deoxy-2'-fluorouridine-3'-phosphate
  modified_base 10: mod_base = OTHER; note = 2'-O-methylguanosine-3'-phosphate
  modified_base 11: mod_base = OTHER; note = 2'-O-methyluridine-3'-phosphate
  modified_base 12: mod_base = OTHER; note = 2'-O-methylguanosine-3'-phosphate
  modified_base 13: mod_base = OTHER; note = 2'-O-methylcytidine-3'-phosphate
  modified_base 14: mod_base = OTHER; note = 2'-deoxy-2'-fluoroadenosine-3'-phosphate
  modified_base 15: mod_base = OTHER; note = 2'-O-methylcytidine-3'-phosphate
  modified_base 16: mod_base = OTHER; note = 2'-deoxy-2'-fluoroadenosine-3'-phosphate
  modified_base 17: mod_base = OTHER; note = 2'-O-methyluridine-3'-phosphate
  modified_base 18: mod_base = OTHER; note = 2'-O-methylguanosine-3'-phosphate
  modified_base 19: mod_base = OTHER; note = 2'-O-methylcytidine-3'-phosphate
  modified_base 20: mod_base = OTHER; note = 2'-O-methylguanosine-3'-phosphate
  modified_base 21: mod_base = OTHER; note = 2'-O-methyladenosine-3'-phosphorothioate
  modified_base 22: mod_base = OTHER; note = 2'-O-methyluridine-3'-phosphorothioate
  modified_base 23: mod_base = OTHER; note = 2'-O-methyluridine
tttttcaatgtgcacatgcgatt

SEQ ID NO: 124 - RNA, 23 nt, synthetic construct
  source 1..23: mol_type = other RNA
aatcgcatgtgcacattgaaaac

SEQ ID NO: 125 - RNA, 21 nt, synthetic construct
  source 1..21: mol_type = other RNA
  modified_base 1: mod_base = OTHER; note = 2'-O-methylguanosine-3'-phosphorothioate
  modified_base 2: mod_base = OTHER; note = 2'-O-methylcytidine-3'-phosphorothioate
  modified_base 3: mod_base = OTHER; note = 2'-O-methyladenosine-3'-phosphate
  modified_base 4: mod_base = OTHER; note = 2'-O-methyluridine-3'-phosphate
  modified_base 5: mod_base = OTHER; note = 2'-O-methylguanosine-3'-phosphate
  modified_base 6: mod_base = OTHER; note = 2'-O-methyluridine-3'-phosphate
  modified_base 7: mod_base = OTHER; note = 2'-deoxy-2'-fluoroguanosine-3'-phosphate
  modified_base 8: mod_base = OTHER; note = 2'-O-methylcytidine-3'-phosphate
  modified_base 9: mod_base = OTHER; note = 2'-deoxy-2'-fluoroadenosine-3'-phosphate
  modified_base 10: mod_base = OTHER; note = 2'-deoxy-2'-fluorocytidine-3'-phosphate
  modified_base 11: mod_base = OTHER; note = 2'-deoxy-2'-fluoroadenosine-3'-phosphate
  modified_base 12: mod_base = OTHER; note = 2'-O-methyluridine-3'-phosphate
  modified_base 13: mod_base = OTHER; note = 2'-O-methyluridine-3'-phosphate
  modified_base 14: mod_base = OTHER; note = 2'-O-methylguanosine-3'-phosphate
  modified_base 15: mod_base = OTHER; note = 2'-O-methyladenosine-3'-phosphate
  modified_base 16: mod_base = OTHER; note = 2'-O-methyladenosine-3'-phosphate
  modified_base 17: mod_base = OTHER; note = 2'-O-methyladenosine-3'-phosphate
  modified_base 18: mod_base = OTHER; note = 2'-O-methyladenosine-3'-phosphate
  modified_base 19: mod_base = OTHER; note = 2'-O-methylcytidine-3'-phosphate
  modified_base 20: mod_base = OTHER; note = 2'-O-methyluridine-3'-phosphate
  modified_base 21: mod_base = OTHER; note = 2'-O-methyladenosine-3'-phosphate ((2S,4R)-1-[29-[[2-(acetylamino)-2-deoxy-beta-D-galactopyra nosyl]oxy]-14,14-bis[[3-[[3-[[5-[[2-(acetylamino)-2-deoxy-b eta-D-galactopyranosyl]oxy]-1-oxopentyl]amino]propyl]amino] -3-oxopropoxy]methyl]-1,12,19,25-tetraoxo-16-oxa-13,20,24-t riazanonacos-1-yl]-4-hydroxy-2-pyrrolidinyl)methyl ester
gcatgtgcacattgaaaacta

SEQ ID NO: 126 - RNA, 23 nt, synthetic construct
  source 1..23: mol_type = other RNA
  modified_base 1: mod_base = OTHER; note = 2'-O-methyluridine-3'-phosphorothioate 5'-(E)-Vinylphosphonate
  modified_base 2: mod_base = OTHER; note = 2'-deoxy-2'-fluoroadenosine-3'-phosphorothioate
  modified_base 3: mod_base = OTHER; note = 2'-O-methylguanosine-3'-phosphate
  modified_base 4: mod_base = OTHER; note = 2'-O-methyluridine-3'-phosphate
  modified_base 5: mod_base = OTHER; note = 2'-O-methyluridine-3'-phosphate
  modified_base 6: mod_base = OTHER; note = 2'-deoxy-2'-fluorouridine-3'-phosphate
  modified_base 7: mod_base = OTHER; note = 2'-O-methyluridine-3'-phosphate
  modified_base 8: mod_base = OTHER; note = 2'-deoxy-2'-fluorocytidine-3'-phosphate
  modified_base 9: mod_base = OTHER; note = 2'-deoxy-2'-fluoroadenosine-3'-phosphate
  modified_base 10: mod_base = OTHER; note = 2'-O-methyladenosine-3'-phosphate
  modified_base 11: mod_base = OTHER; note = 2'-O-methyluridine-3'-phosphate
  modified_base 12: mod_base = OTHER; note = 2'-O-methylguanosine-3'-phosphate
  modified_base 13: mod_base = OTHER; note = 2'-O-methyluridine-3'-phosphate
  modified_base 14: mod_base = OTHER; note = 2'-deoxy-2'-fluoroguanosine-3'-phosphate
  modified_base 15: mod_base = OTHER; note = 2'-O-methylcytidine-3'-phosphate
  modified_base 16: mod_base = OTHER; note = 2'-deoxy-2'-fluoroadenosine-3'-phosphate
  modified_base 17: mod_base = OTHER; note = 2'-O-methylcytidine-3'-phosphate
  modified_base 18: mod_base = OTHER; note = 2'-O-methyladenosine-3'-phosphate
  modified_base 19: mod_base = OTHER; note = 2'-O-methyluridine-3'-phosphate
  modified_base 20: mod_base = OTHER; note = 2'-O-methylguanosine-3'-phosphate
  modified_base 21: mod_base = OTHER; note = 2'-O-methylcytidine-3'-phosphorothioate
  modified_base 22: mod_base = OTHER; note = 2'-O-methylguanosine-3'-phosphorothioate
  modified_base 23: mod_base = OTHER; note = 2'-O-methyladenosine
tagttttcaatgtgcacatgcga

SEQ ID NO: 127 - RNA, 23 nt, synthetic construct
  source 1..23: mol_type = other RNA
tcgcatgtgcacattgaaaactg

SEQ ID NO: 128 - RNA, 21 nt, synthetic construct
  source 1..21: mol_type = other RNA
  modified_base 1: mod_base = OTHER; note = 2'-O-methylcytidine-3'-phosphorothioate
  modified_base 2: mod_base = OTHER; note = 2'-O-methyladenosine-3'-phosphorothioate
  modified_base 3: mod_base = OTHER; note = 2'-O-methyluridine-3'-phosphate
  modified_base 4: mod_base = OTHER; note = 2'-O-methylguanosine-3'-phosphate
  modified_base 5: mod_base = OTHER; note = 2'-O-methyluridine-3'-phosphate
  modified_base 6: mod_base = OTHER; note = 2'-O-methylguanosine-3'-phosphate
  modified_base 7: mod_base = OTHER; note = 2'-deoxy-2'-fluorocytidine-3'-phosphate
  modified_base 8: mod_base = OTHER; note = 2'-O-methyladenosine-3'-phosphate
  modified_base 9: mod_base = OTHER; note = 2'-deoxy-2'-fluorocytidine-3'-phosphate
  modified_base 10: mod_base = OTHER; note = 2'-deoxy-2'-fluoroadenosine-3'-phosphate
  modified_base 11: mod_base = OTHER; note = 2'-deoxy-2'-fluorouridine-3'-phosphate
  modified_base 12: mod_base = OTHER; note = 2'-O-methyluridine-3'-phosphate
  modified_base 13: mod_base = OTHER; note = 2'-O-methylguanosine-3'-phosphate
  modified_base 14: mod_base = OTHER; note = 2'-O-methyladenosine-3'-phosphate
  modified_base 15: mod_base = OTHER; note = 2'-O-methyladenosine-3'-phosphate
  modified_base 16: mod_base = OTHER; note = 2'-O-methyladenosine-3'-phosphate
  modified_base 17: mod_base = OTHER; note = 2'-O-methyladenosine-3'-phosphate
  modified_base 18: mod_base = OTHER; note = 2'-O-methylcytidine-3'-phosphate
  modified_base 19: mod_base = OTHER; note = 2'-O-methyluridine-3'-phosphate
  modified_base 20: mod_base = OTHER; note = 2'-O-methylguanosine-3'-phosphate
  modified_base 21: mod_base = OTHER; note = 2'-O-methyladenosine-3'-phosphate ((2S,4R)-1-[29-[[2-(acetylamino)-2-deoxy-beta-D-galactopyra nosyl]oxy]-14,14-bis[[3-[[3-[[5-[[2-(acetylamino)-2-deoxy-b eta-D-galactopyranosyl]oxy]-1-oxopentyl]amino]propyl]amino] -3-oxopropoxy]methyl]-1,12,19,25-tetraoxo-16-oxa-13,20,24-t riazanonacos-1-yl]-4-hydroxy-2-pyrrolidinyl)methyl ester
catgtgcacattgaaaactga

SEQ ID NO: 129 - RNA, 23 nt, synthetic construct
  source 1..23: mol_type = other RNA
  modified_base 1: mod_base = OTHER; note = 2'-O-methyluridine-3'-phosphorothioate 5'-(E)-Vinylphosphonate
  modified_base 2: mod_base = OTHER; note = 2'-deoxy-2'-fluorocytidine-3'-phosphorothioate
  modified_base 3: mod_base = OTHER; note = 2'-O-methyladenosine-3'-phosphate
  modified_base 4: mod_base = OTHER; note = 2'-O-methylguanosine-3'-phosphate
  modified_base 5: mod_base = OTHER; note = 2'-O-methyluridine-3'-phosphate
  modified_base 6: mod_base = OTHER; note = 2'-deoxy-2'-fluorouridine-3'-phosphate
  modified_base 7: mod_base = OTHER; note = 2'-O-methyluridine-3'-phosphate
  modified_base 8: mod_base = OTHER; note = 2'-deoxy-2'-fluorouridine-3'-phosphate
  modified_base 9: mod_base = OTHER; note = 2'-deoxy-2'-fluorocytidine-3'-phosphate
  modified_base 10: mod_base = OTHER; note = 2'-O-methyladenosine-3'-phosphate
  modified_base 11: mod_base = OTHER; note = 2'-O-methyladenosine-3'-phosphate
  modified_base 12: mod_base = OTHER; note = 2'-O-methyluridine-3'-phosphate
  modified_base 13: mod_base = OTHER; note = 2'-O-methylguanosine-3'-phosphate
  modified_base 14: mod_base = OTHER; note = 2'-deoxy-2'-fluorouridine-3'-phosphate
  modified_base 15: mod_base = OTHER; note = 2'-O-methylguanosine-3'-phosphate
  modified_base 16: mod_base = OTHER; note = 2'-deoxy-2'-fluorocytidine-3'-phosphate
  modified_base 17: mod_base = OTHER; note = 2'-O-methyladenosine-3'-phosphate
  modified_base 18: mod_base = OTHER; note = 2'-O-methylcytidine-3'-phosphate
  modified_base 19: mod_base = OTHER; note = 2'-O-methyladenosine-3'-phosphate
  modified_base 20: mod_base = OTHER; note = 2'-O-methyluridine-3'-phosphate
  modified_base 21: mod_base = OTHER; note = 2'-O-methylguanosine-3'-phosphorothioate
  modified_base 22: mod_base = OTHER; note = 2'-O-methylcytidine-3'-phosphorothioate
  modified_base 23: mod_base = OTHER; note = 2'-O-methylguanosine
tcagttttcaatgtgcacatgcg

SEQ ID NO: 130 - RNA, 23 nt, synthetic construct
  source 1..23: mol_type = other RNA
cgcatgtgcacattgaaaactgt

SEQ ID NO: 131 - RNA, 21 nt, synthetic construct
  source 1..21: mol_type = other RNA
  modified_base 1: mod_base = OTHER; note = 2'-O-methyladenosine-3'-phosphorothioate
  modified_base 2: mod_base = OTHER; note = 2'-O-methyluridine-3'-phosphorothioate
  modified_base 3: mod_base = OTHER; note = 2'-O-methylguanosine-3'-phosphate
  modified_base 4: mod_base = OTHER; note = 2'-O-methyluridine-3'-phosphate
  modified_base 5: mod_base = OTHER; note = 2'-O-methylguanosine-3'-phosphate
  modified_base 6: mod_base = OTHER; note = 2'-O-methylcytidine-3'-phosphate
  modified_base 7: mod_base = OTHER; note = 2'-deoxy-2'-fluoroadenosine-3'-phosphate
  modified_base 8: mod_base = OTHER; note = 2'-O-methylcytidine-3'-phosphate
  modified_base 9: mod_base = OTHER; note = 2'-deoxy-2'-fluoroadenosine-3'-phosphate
  modified_base 10: mod_base = OTHER; note = 2'-deoxy-2'-fluorouridine-3'-phosphate
  modified_base 11: mod_base = OTHER; note = 2'-deoxy-2'-fluorouridine-3'-phosphate
  modified_base 12: mod_base = OTHER; note = 2'-O-methylguanosine-3'-phosphate
  modified_base 13: mod_base = OTHER; note = 2'-O-methyladenosine-3'-phosphate
  modified_base 14: mod_base = OTHER; note = 2'-O-methyladenosine-3'-phosphate
  modified_base 15: mod_base = OTHER; note = 2'-O-methyladenosine-3'-phosphate
  modified_base 16: mod_base = OTHER; note = 2'-O-methyladenosine-3'-phosphate
  modified_base 17: mod_base = OTHER; note = 2'-O-methylcytidine-3'-phosphate
  modified_base 18: mod_base = OTHER; note = 2'-O-methyluridine-3'-phosphate
  modified_base 19: mod_base = OTHER; note = 2'-O-methylguanosine-3'-phosphate
  modified_base 20: mod_base = OTHER; note = 2'-O-methyluridine-3'-phosphate
  modified_base 21: mod_base = OTHER; note = 2'-O-methyladenosine-3'-phosphate ((2S,4R)-1-[29-[[2-(acetylamino)-2-deoxy-beta-D-galactopyra nosyl]oxy]-14,14-bis[[3-[[3-[[5-[[2-(acetylamino)-2-deoxy-b eta-D-galactopyranosyl]oxy]-1-oxopentyl]amino]propyl]amino] -3-oxopropoxy]methyl]-1,12,19,25-tetraoxo-16-oxa-13,20,24-t riazanonacos-1-yl]-4-hydroxy-2-pyrrolidinyl)methyl ester
atgtgcacattgaaaactgta

SEQ ID NO: 132 - RNA, 23 nt, synthetic construct
  source 1..23: mol_type = other RNA
  modified_base 1: mod_base = OTHER; note = 2'-O-methyluridine-3'-phosphorothioate 5'-(E)-Vinylphosphonate
  modified_base 2: mod_base = OTHER; note = 2'-deoxy-2'-fluoroadenosine-3'-phosphorothioate
  modified_base 3: mod_base = OTHER; note = 2'-O-methylcytidine-3'-phosphate
  modified_base 4: mod_base = OTHER; note = 2'-O-methyladenosine-3'-phosphate
  modified_base 5: mod_base = OTHER; note = 2'-O-methylguanosine-3'-phosphate
  modified_base 6: mod_base = OTHER; note = 2'-deoxy-2'-fluorouridine-3'-phosphate
  modified_base 7: mod_base = OTHER; note = 2'-O-methyluridine-3'-phosphate
  modified_base 8: mod_base = OTHER; note = 2'-deoxy-2'-fluorouridine-3'-phosphate
  modified_base 9: mod_base = OTHER; note = 2'-deoxy-2'-fluorouridine-3'-phosphate
  modified_base 10: mod_base = OTHER; note = 2'-O-methylcytidine-3'-phosphate
  modified_base 11: mod_base = OTHER; note = 2'-O-methyladenosine-3'-phosphate
  modified_base 12: mod_base = OTHER; note = 2'-O-methyladenosine-3'-phosphate
  modified_base 13: mod_base = OTHER; note = 2'-O-methyluridine-3'-phosphate
  modified_base 14: mod_base = OTHER; note = 2'-deoxy-2'-fluoroguanosine-3'-phosphate
  modified_base 15: mod_base = OTHER; note = 2'-O-methyluridine-3'-phosphate
  modified_base 16: mod_base = OTHER; note = 2'-deoxy-2'-fluoroguanosine-3'-phosphate
  modified_base 17: mod_base = OTHER; note = 2'-O-methylcytidine-3'-phosphate
  modified_base 18: mod_base = OTHER; note = 2'-O-methyladenosine-3'-phosphate
  modified_base 19: mod_base = OTHER; note = 2'-O-methylcytidine-3'-phosphate
  modified_base 20: mod_base = OTHER; note = 2'-O-methyladenosine-3'-phosphate
  modified_base 21: mod_base = OTHER; note = 2'-O-methyluridine-3'-phosphorothioate
  modified_base 22: mod_base = OTHER; note = 2'-O-methylguanosine-3'-phosphorothioate
  modified_base 23: mod_base = OTHER; note = 2'-O-methylcytidine
tacagttttcaatgtgcacatgc

SEQ ID NO: 133 - RNA, 23 nt, synthetic construct
  source 1..23: mol_type = other RNA
gcatgtgcacattgaaaactgtg

SEQ ID NO: 134 - RNA, 21 nt, synthetic construct
  source 1..21: mol_type = other RNA
  modified_base 1: mod_base = OTHER; note = 2'-O-methyladenosine-3'-phosphorothioate
  modified_base 2: mod_base = OTHER; note = 2'-O-methyluridine-3'-phosphorothioate
  modified_base 3: mod_base = OTHER; note = 2'-O-methylguanosine-3'-phosphate
  modified_base 4: mod_base = OTHER; note = 2'-O-methylguanosine-3'-phosphate
  modified_base 5: mod_base = OTHER; note = 2'-O-methyluridine-3'-phosphate
  modified_base 6: mod_base = OTHER; note = 2'-O-methylcytidine-3'-phosphate
  modified_base 7: mod_base = OTHER; note = 2'-deoxy-2'-fluoroadenosine-3'-phosphate
  modified_base 8: mod_base = OTHER; note = 2'-O-methylguanosine-3'-phosphate
  modified_base 9: mod_base = OTHER; note = 2'-deoxy-2'-fluoroadenosine-3'-phosphate
  modified_base 10: mod_base = OTHER; note = 2'-deoxy-2'-fluorouridine-3'-phosphate
  modified_base 11: mod_base = OTHER; note = 2'-deoxy-2'-fluorocytidine-3'-phosphate
  modified_base 12: mod_base = OTHER; note = 2'-O-methyluridine-3'-phosphate
  modified_base 13: mod_base = OTHER; note = 2'-O-methyluridine-3'-phosphate
  modified_base 14: mod_base = OTHER; note = 2'-O-methylcytidine-3'-phosphate
  modified_base 15: mod_base = OTHER; note = 2'-O-methyladenosine-3'-phosphate
  modified_base 16: mod_base = OTHER; note = 2'-O-methyladenosine-3'-phosphate
  modified_base 17: mod_base = OTHER; note = 2'-O-methyladenosine-3'-phosphate
  modified_base 18: mod_base = OTHER; note = 2'-O-methyladenosine-3'-phosphate
  modified_base 19: mod_base = OTHER; note = 2'-O-methyluridine-3'-phosphate
  modified_base 20: mod_base = OTHER; note = 2'-O-methyladenosine-3'-phosphate
  modified_base 21: mod_base = OTHER; note = 2'-O-methyladenosine-3'-phosphate ((2S,4R)-1-[29-[[2-(acetylamino)-2-deoxy-beta-D-galactopyra nosyl]oxy]-14,14-bis[[3-[[3-[[5-[[2-(acetylamino)-2-deoxy-b eta-D-galactopyranosyl]oxy]-1-oxopentyl]amino]propyl]amino] -3-oxopropoxy]methyl]-1,12,19,25-tetraoxo-16-oxa-13,20,24-t riazanonacos-1-yl]-4-hydroxy-2-pyrrolidinyl)methyl ester
atggtcagatcttcaaaataa

SEQ ID NO: 135 - RNA, 23 nt, synthetic construct
  source 1..23: mol_type = other RNA
  modified_base 1: mod_base = OTHER; note = 2'-O-methyluridine-3'-phosphorothioate 5'-(E)-Vinylphosphonate
  modified_base 2: mod_base = OTHER; note = 2'-deoxy-2'-fluorouridine-3'-phosphorothioate
  modified_base 3: mod_base = OTHER; note = 2'-O-methyladenosine-3'-phosphate
  modified_base 4: mod_base = OTHER; note = 2'-O-methyluridine-3'-phosphate
  modified_base 5: mod_base = OTHER; note = 2'-O-methyluridine-3'-phosphate
  modified_base 6: mod_base = OTHER; note = 2'-deoxy-2'-fluorouridine-3'-phosphate
  modified_base 7: mod_base = OTHER; note = 2'-O-methyluridine-3'-phosphate
  modified_base 8: mod_base = OTHER; note = 2'-deoxy-2'-fluoroguanosine-3'-phosphate
  modified_base 9: mod_base = OTHER; note = 2'-deoxy-2'-fluoroadenosine-3'-phosphate
  modified_base 10: mod_base = OTHER; note = 2'-O-methyladenosine-3'-phosphate
  modified_base 11: mod_base = OTHER; note = 2'-O-methylguanosine-3'-phosphate
  modified_base 12: mod_base = OTHER; note = 2'-O-methyladenosine-3'-phosphate
  modified_base 13: mod_base = OTHER; note = 2'-O-methyluridine-3'-phosphate
  modified_base 14: mod_base = OTHER; note = 2'-deoxy-2'-fluorocytidine-3'-phosphate
  modified_base 15: mod_base = OTHER; note = 2'-O-methyluridine-3'-phosphate
  modified_base 16: mod_base = OTHER; note = 2'-deoxy-2'-fluoroguanosine-3'-phosphate
  modified_base 17: mod_base = OTHER; note = 2'-O-methyladenosine-3'-phosphate
  modified_base 18: mod_base = OTHER; note = 2'-O-methylcytidine-3'-phosphate
  modified_base 19: mod_base = OTHER; note = 2'-O-methylcytidine-3'-phosphate
  modified_base 20: mod_base = OTHER; note = 2'-O-methyladenosine-3'-phosphate
  modified_base 21: mod_base = OTHER; note = 2'-O-methyluridine-3'-phosphorothioate
  modified_base 22: mod_base = OTHER; note = 2'-O-methyluridine-3'-phosphorothioate
  modified_base 23: mod_base = OTHER; note = 2'-O-methylguanosine
ttattttgaagatctgaccattg

SEQ ID NO: 136 - RNA, 23 nt, synthetic construct
  source 1..23: mol_type = other RNA
caatggtcagatcttcaaaataa

SEQ ID NO: 137 - RNA, 21 nt, synthetic construct
  source 1..21: mol_type = other RNA
  modified_base 1: mod_base = OTHER; note = 2'-O-methyladenosine-3'-phosphorothioate
  modified_base 2: mod_base = OTHER; note = 2'-O-methyladenosine-3'-phosphorothioate
  modified_base 3: mod_base = OTHER; note = 2'-O-methyladenosine-3'-phosphate
  modified_base 4: mod_base = OTHER; note = 2'-O-methyluridine-3'-phosphate
  modified_base 5: mod_base = OTHER; note = 2'-O-methyluridine-3'-phosphate
  modified_base 6: mod_base = OTHER; note = 2'-O-methyluridine-3'-phosphate
  modified_base 7: mod_base = OTHER; note = 2'-deoxy-2'-fluoroguanosine-3'-phosphate
  modified_base 8: mod_base = OTHER; note = 2'-O-methyluridine-3'-phosphate
  modified_base 9: mod_base = OTHER; note = 2'-deoxy-2'-fluoroguanosine-3'-phosphate
  modified_base 10: mod_base = OTHER; note = 2'-deoxy-2'-fluorouridine-3'-phosphate
  modified_base 11: mod_base = OTHER; note = 2'-deoxy-2'-fluorouridine-3'-phosphate
  modified_base 12: mod_base = OTHER; note = 2'-O-methylcytidine-3'-phosphate
  modified_base 13: mod_base = OTHER; note = 2'-O-methyladenosine-3'-phosphate
  modified_base 14: mod_base = OTHER; note = 2'-O-methylcytidine-3'-phosphate
  modified_base 15: mod_base = OTHER; note = 2'-O-methyladenosine-3'-phosphate
  modified_base 16: mod_base = OTHER; note = 2'-O-methyladenosine-3'-phosphate
  modified_base 17: mod_base = OTHER; note = 2'-O-methyladenosine-3'-phosphate
  modified_base 18: mod_base = OTHER; note = 2'-O-methylguanosine-3'-phosphate
  modified_base 19: mod_base = OTHER; note = 2'-O-methylguanosine-3'-phosphate
  modified_base 20: mod_base = OTHER; note = 2'-O-methyladenosine-3'-phosphate
  modified_base 21: mod_base = OTHER; note = 2'-O-methyladenosine-3'-phosphate ((2S,4R)-1-[29-[[2-(acetylamino)-2-deoxy-beta-D-galactopyra nosyl]oxy]-14,14-bis[[3-[[3-[[5-[[2-(acetylamino)-2-deoxy-b eta-D-galactopyranosyl]oxy]-1-oxopentyl]amino]propyl]amino] -3-oxopropoxy]methyl]-1,12,19,25-tetraoxo-16-oxa-13,20,24-t riazanonacos-1-yl]-4-hydroxy-2-pyrrolidinyl)methyl ester
aaatttgtgttcacaaaggaa

SEQ ID NO: 138 - RNA, 23 nt, synthetic construct
  source 1..23: mol_type = other RNA
  modified_base 1: mod_base = OTHER; note = 2'-O-methyluridine-3'-phosphorothioate 5'-(E)-Vinylphosphonate
  modified_base 2: mod_base = OTHER; note = 2'-deoxy-2'-fluorouridine-3'-phosphorothioate
  modified_base 3: mod_base = OTHER; note = 2'-O-methylcytidine-3'-phosphate
  modified_base 4: mod_base = OTHER; note = 2'-O-methylcytidine-3'-phosphate
  modified_base 5: mod_base = OTHER; note = 2'-O-methyluridine-3'-phosphate
  modified_base 6: mod_base = OTHER; note = 2'-deoxy-2'-fluorouridine-3'-phosphate
  modified_base 7: mod_base = OTHER; note = 2'-O-methyluridine-3'-phosphate
  modified_base 8: mod_base = OTHER; note = 2'-deoxy-2'-fluoroguanosine-3'-phosphate
  modified_base 9: mod_base = OTHER; note = 2'-deoxy-2'-fluorouridine-3'-phosphate
  modified_base 10: mod_base = OTHER; note = 2'-O-methylguanosine-3'-phosphate
  modified_base 11: mod_base = OTHER; note = 2'-O-methyladenosine-3'-phosphate
  modified_base 12: mod_base = OTHER; note = 2'-O-methyladenosine-3'-phosphate
  modified_base 13: mod_base = OTHER; note = 2'-O-methylcytidine-3'-phosphate
  modified_base 14: mod_base = OTHER; note = 2'-deoxy-2'-fluoroadenosine-3'-phosphate
  modified_base 15: mod_base = OTHER; note = 2'-O-methylcytidine-3'-phosphate
  modified_base 16: mod_base = OTHER; note = 2'-deoxy-2'-fluoroadenosine-3'-phosphate
  modified_base 17: mod_base = OTHER; note = 2'-O-methyladenosine-3'-phosphate
  modified_base 18: mod_base = OTHER; note = 2'-O-methyladenosine-3'-phosphate
  modified_base 19: mod_base = OTHER; note = 2'-O-methyluridine-3'-phosphate
  modified_base 20: mod_base = OTHER; note = 2'-O-methyluridine-3'-phosphate
  modified_base 21: mod_base = OTHER; note = 2'-O-methyluridine-3'-phosphorothioate
  modified_base 22: mod_base = OTHER; note = 2'-O-methylcytidine-3'-phosphorothioate
  modified_base 23: mod_base = OTHER; note = 2'-O-methyluridine
ttcctttgtgaacacaaatttct

SEQ ID NO: 139 - RNA, 23 nt, synthetic construct
  source 1..23: mol_type = other RNA
agaaatttgtgttcacaaaggaa

SEQ ID NO: 140 - RNA, 21 nt, synthetic construct
  source 1..21: mol_type = other RNA
  modified_base 1: mod_base = OTHER; note = 2'-O-methyladenosine-3'-phosphorothioate
  modified_base 2: mod_base = OTHER; note = 2'-O-methyluridine-3'-phosphorothioate
  modified_base 3: mod_base = OTHER; note = 2'-O-methyluridine-3'-phosphate
  modified_base 4: mod_base = OTHER; note = 2'-O-methyluridine-3'-phosphate
  modified_base 5: mod_base = OTHER; note = 2'-O-methylguanosine-3'-phosphate
  modified_base 6: mod_base = OTHER; note = 2'-O-methyluridine-3'-phosphate
  modified_base 7: mod_base = OTHER; note = 2'-deoxy-2'-fluoroguanosine-3'-phosphate
  modified_base 8: mod_base = OTHER; note = 2'-O-methyluridine-3'-phosphate
  modified_base 9: mod_base = OTHER; note = 2'-deoxy-2'-fluorouridine-3'-phosphate
  modified_base 10: mod_base = OTHER; note = 2'-deoxy-2'-fluorocytidine-3'-phosphate
  modified_base 11: mod_base = OTHER; note = 2'-deoxy-2'-fluoroadenosine-3'-phosphate
  modified_base 12: mod_base = OTHER; note = 2'-O-methylcytidine-3'-phosphate
  modified_base 13: mod_base = OTHER; note = 2'-O-methyladenosine-3'-phosphate
  modified_base 14: mod_base = OTHER; note = 2'-O-methyladenosine-3'-phosphate
  modified_base 15: mod_base = OTHER; note = 2'-O-methyladenosine-3'-phosphate
  modified_base 16: mod_base = OTHER; note = 2'-O-methylguanosine-3'-phosphate
  modified_base 17: mod_base = OTHER; note = 2'-O-methylguanosine-3'-phosphate
  modified_base 18: mod_base = OTHER; note = 2'-O-methyladenosine-3'-phosphate
  modified_base 19: mod_base = OTHER; note = 2'-O-methyladenosine-3'-phosphate
  modified_base 20: mod_base = OTHER; note = 2'-O-methyladenosine-3'-phosphate
  modified_base 21: mod_base = OTHER; note = 2'-O-methyladenosine-3'-phosphate ((2S,4R)-1-[29-[[2-(acetylamino)-2-deoxy-beta-D-galactopyra nosyl]oxy]-14,14-bis[[3-[[3-[[5-[[2-(acetylamino)-2-deoxy-b eta-D-galactopyranosyl]oxy]-1-oxopentyl]amino]propyl]amino] -3-oxopropoxy]methyl]-1,12,19,25-tetraoxo-16-oxa-13,20,24-t riazanonacos-1-yl]-4-hydroxy-2-pyrrolidinyl)methyl ester
atttgtgttcacaaaggaaaa

SEQ ID NO: 141 - RNA, 23 nt, synthetic construct
  source 1..23: mol_type = other RNA
  modified_base 1: mod_base = OTHER; note = 2'-O-methyluridine-3'-phosphorothioate 5'-(E)-Vinylphosphonate
  modified_base 2: mod_base = OTHER; note = 2'-deoxy-2'-fluorouridine-3'-phosphorothioate
  modified_base 3: mod_base = OTHER; note = 2'-O-methyluridine-3'-phosphate
  modified_base 4: mod_base = OTHER; note = 2'-O-methyluridine-3'-phosphate
  modified_base 5: mod_base = OTHER; note = 2'-O-methylcytidine-3'-phosphate
  modified_base 6: mod_base = OTHER; note = 2'-deoxy-2'-fluorocytidine-3'-phosphate
  modified_base 7: mod_base = OTHER; note = 2'-O-methyluridine-3'-phosphate
  modified_base 8: mod_base = OTHER; note = 2'-deoxy-2'-fluorouridine-3'-phosphate
  modified_base 9: mod_base = OTHER; note = 2'-deoxy-2'-fluorouridine-3'-phosphate
  modified_base 10: mod_base = OTHER; note = 2'-O-methylguanosine-3'-phosphate
  modified_base 11: mod_base = OTHER; note = 2'-O-methyluridine-3'-phosphate
  modified_base 12: mod_base = OTHER; note = 2'-O-methylguanosine-3'-phosphate
  modified_base 13: mod_base = OTHER; note = 2'-O-methyladenosine-3'-phosphate
  modified_base 14: mod_base = OTHER; note = 2'-deoxy-2'-fluoroadenosine-3'-phosphate
  modified_base 15: mod_base = OTHER; note = 2'-O-methylcytidine-3'-phosphate
  modified_base 16: mod_base = OTHER; note = 2'-deoxy-2'-fluoroadenosine-3'-phosphate
  modified_base 17: mod_base = OTHER; note = 2'-O-methylcytidine-3'-phosphate
  modified_base 18: mod_base = OTHER; note = 2'-O-methyladenosine-3'-phosphate
  modified_base 19: mod_base = OTHER; note = 2'-O-methyladenosine-3'-phosphate
  modified_base 20: mod_base = OTHER; note = 2'-O-methyladenosine-3'-phosphate
  modified_base 21: mod_base = OTHER; note = 2'-O-methyluridine-3'-phosphorothioate
  modified_base 22: mod_base = OTHER; note = 2'-O-methyluridine-3'-phosphorothioate
  modified_base 23: mod_base = OTHER; note = 2'-O-methyluridine
ttttcctttgtgaacacaaattt

SEQ ID NO: 142 - RNA, 23 nt, synthetic construct
  source 1..23: mol_type = other RNA
aaatttgtgttcacaaaggaaaa

SEQ ID NO: 143 - RNA, 21 nt, synthetic construct
  source 1..21: mol_type = other RNA
ttgtgtctcacactaaagaaa

SEQ ID NO: 144 - RNA, 23 nt, synthetic construct
  source 1..23: mol_type = other RNA
tttctttagtgtgagacacaaaa

SEQ ID NO: 145 - RNA, 21 nt, synthetic construct
  source 1..21: mol_type = other RNA
gtgtctcacactaaagaaata

SEQ ID NO: 146 - RNA, 23 nt, synthetic construct
  source 1..23: mol_type = other RNA
tatttctttagtgtgagacacaa

SEQ ID NO: 147 - RNA, 21 nt, synthetic construct
  source 1..21: mol_type = other RNA
aattctaaggctaaatagcta

SEQ ID NO: 148 - RNA, 23 nt, synthetic construct
  source 1..23: mol_type = other RNA
tagctatttagccttagaattct

SEQ ID NO: 149 - RNA, 21 nt, synthetic construct
  source 1..21: mol_type = other RNA
ggaagtattcattcaaactta

SEQ ID NO: 150 - RNA, 23 nt, synthetic construct
  source 1..23: mol_type = other RNA
taagtttgaatgaatacttccta

SEQ ID NO: 151 - RNA, 21 nt, synthetic construct
  source 1..21: mol_type = other RNA
ttcattcaaacttgaatatta

SEQ ID NO: 152 - RNA, 23 nt, synthetic construct
  source 1..23: mol_type = other RNA
taatattcaagtttgaatgaata

SEQ ID NO: 153 - RNA, 21 nt, synthetic construct
  source 1..21: mol_type = other RNA
tcattcaaacttgaatattct

SEQ ID NO: 154 - RNA, 23 nt, synthetic construct
  source 1..23: mol_type = other RNA
agaatattcaagtttgaatgaat

SEQ ID NO: 155 - RNA, 21 nt, synthetic construct
  source 1..21: mol_type = other RNA
cattcaaacttgaatattctt

SEQ ID NO: 156 - RNA, 23 nt, synthetic construct
  source 1..23: mol_type = other RNA
aagaatattcaagtttgaatgaa

SEQ ID NO: 157 - RNA, 21 nt, synthetic construct
  source 1..21: mol_type = other RNA
tcaaacttgaatattcttcaa

SEQ ID NO: 158 - RNA, 23 nt, synthetic construct
  source 1..23: mol_type = other RNA
ttgaagaatattcaagtttgaat

SEQ ID NO: 159 - RNA, 21 nt, synthetic construct
  source 1..21: mol_type = other RNA
caaacttgaatattcttcaaa

SEQ ID NO: 160 - RNA, 23 nt, synthetic construct
  source 1..23: mol_type = other RNA
tttgaagaatattcaagtttgaa

SEQ ID NO: 161 - RNA, 21 nt, synthetic construct
  source 1..21: mol_type = other RNA
aaacttgaatattcttcaaaa

SEQ ID NO: 162 - RNA, 23 nt, synthetic construct
  source 1..23: mol_type = other RNA
ttttgaagaatattcaagtttga

SEQ ID NO: 163 - RNA, 21 nt, synthetic construct
  source 1..21: mol_type = other RNA
cttgaatattcttcaaagaga

SEQ ID NO: 164 - RNA, 23 nt, synthetic construct
  source 1..23: mol_type = other RNA
tctctttgaagaatattcaagtt

SEQ ID NO: 165 - RNA, 21 nt, synthetic construct
  source 1..21: mol_type = other RNA
actctaatcagaggaagaaaa

SEQ ID NO: 166 - RNA, 23 nt, synthetic construct
  source 1..23: mol_type = other RNA
ttttcttcctctgattagagttg

SEQ ID NO: 167 - RNA, 21 nt, synthetic construct
  source 1..21: mol_type = other RNA
gaagtaaaaccagatgtttta

SEQ ID NO: 168 - RNA, 23 nt, synthetic construct
  source 1..23: mol_type = other RNA
taaaacatctggttttacttcct

SEQ ID NO: 169 - RNA, 21 nt, synthetic construct
  source 1..21: mol_type = other RNA
gtaaaaccagatgttttccaa

SEQ ID NO: 170 - RNA, 23 nt, synthetic construct
  source 1..23: mol_type = other RNA
ttggaaaacatctggttttactt

SEQ ID NO: 171 - RNA, 21 nt, synthetic construct
  source 1..21: mol_type = other RNA
aaaaccagatgttttccacca

SEQ ID NO: 172 - RNA, 23 nt, synthetic construct
  source 1..23: mol_type = other RNA
tggtggaaaacatctggttttac

SEQ ID NO: 173 - RNA, 21 nt, synthetic construct
  source 1..21: mol_type = other RNA
aaaccagatgttttccaccaa

SEQ ID NO: 174 - RNA, 23 nt, synthetic construct
  source 1..23: mol_type = other RNA
ttggtggaaaacatctggtttta

SEQ ID NO: 175 - RNA, 21 nt, synthetic construct
  source 1..21: mol_type = other RNA
aaccagatgttttccaccaaa

SEQ ID NO: 176 - RNA, 23 nt, synthetic construct
  source 1..23: mol_type = other RNA
tttggtggaaaacatctggtttt

SEQ ID NO: 177 - RNA, 21 nt, synthetic construct
  source 1..21: mol_type = other RNA
accagatgttttccaccaaaa

SEQ ID NO: 178 - RNA, 23 nt, synthetic construct
  source 1..23: mol_type = other RNA
ttttggtggaaaacatctggttt

SEQ ID NO: 179 - RNA, 21 nt, synthetic construct
  source 1..21: mol_type = other RNA
atggctgtggacagtactcta

SEQ ID NO: 180 - RNA, 23 nt, synthetic construct
  source 1..23: mol_type = other RNA
tagagtactgtccacagccatgg

SEQ ID NO: 181 - RNA, 21 nt, synthetic construct
  source 1..21: mol_type = other RNA
caggagaaaccttatcaaaaa

SEQ ID NO: 182 - RNA, 23 nt, synthetic construct
  source 1..23: mol_type = other RNA
tttttgataaggtttctcctggc

SEQ ID NO: 183 - RNA, 21 nt, synthetic construct
  source 1..21: mol_type = other RNA
ggagaaaccttatcaaaacaa

SEQ ID NO: 184 - RNA, 23 nt, synthetic construct
  source 1..23: mol_type = other RNA
ttgttttgataaggtttctcctg

SEQ ID NO: 185 - RNA, 21 nt, synthetic construct
  source 1..21: mol_type = other RNA
ttgtgtcaaaatgttctacat

SEQ ID NO: 186 - RNA, 23 nt, synthetic construct
  source 1..23: mol_type = other RNA
atgtagaacattttgacacaaaa

SEQ ID NO: 187 - RNA, 21 nt, synthetic construct
  source 1..21: mol_type = other RNA
tgtgtcaaaatgttctacatt

SEQ ID NO: 188 - RNA, 23 nt, synthetic construct
  source 1..23: mol_type = other RNA
aatgtagaacattttgacacaaa

SEQ ID NO: 189 - RNA, 21 nt, synthetic construct
  source 1..21: mol_type = other RNA
gtgtcaaaatgttctacatta

SEQ ID NO: 190 - RNA, 23 nt, synthetic construct
  source 1..23: mol_type = other RNA
taatgtagaacattttgacacaa

SEQ ID NO: 191 - RNA, 21 nt, synthetic construct
  source 1..21: mol_type = other RNA
tgtcaaaatgttctacattaa

SEQ ID NO: 192 - RNA, 23 nt, synthetic construct
  source 1..23: mol_type = other RNA
ttaatgtagaacattttgacaca

SEQ ID NO: 193 - RNA, 21 nt, synthetic construct
  source 1..21: mol_type = other RNA
aatgttctacattaagccaat

SEQ ID NO: 194 - RNA, 23 nt, synthetic construct
  source 1..23: mol_type = other RNA
attggcttaatgtagaacatttt

SEQ ID NO: 195 - RNA, 21 nt, synthetic construct
  source 1..21: mol_type = other RNA
atgttctacattaagccaatt

SEQ ID NO: 196 - RNA, 23 nt, synthetic construct
  source 1..23: mol_type = other RNA
aattggcttaatgtagaacattt

SEQ ID NO: 197 - RNA, 21 nt, synthetic construct
  source 1..21: mol_type = other RNA
ttctacattaagccaattaaa

SEQ ID NO: 198 - RNA, 23 nt, synthetic construct
  source 1..23: mol_type = other RNA
tttaattggcttaatgtagaaca

SEQ ID NO: 199 - RNA, 21 nt, synthetic construct
  source 1..21: mol_type = other RNA
tctacattaagccaattaagt

SEQ ID NO: 200 - RNA, 23 nt, synthetic construct
  source 1..23: mol_type = other RNA
acttaattggcttaatgtagaac

SEQ ID NO: 201 - RNA, 21 nt, synthetic construct
  source 1..21: mol_type = other RNA
ctacattaagccaattaagta

SEQ ID NO: 202 - RNA, 23 nt, synthetic construct
  source 1..23: mol_type = other RNA
tacttaattggcttaatgtagaa

SEQ ID NO: 203 - RNA, 21 nt, synthetic construct
  source 1..21: mol_type = other RNA
tacattaagccaattaagtat

SEQ ID NO: 204 - RNA, 23 nt, synthetic construct
  source 1..23: mol_type = other RNA
atacttaattggcttaatgtaga

SEQ ID NO: 205 - RNA, 21 nt, synthetic construct
  source 1..21: mol_type = other RNA
cattaagccaattaagtataa

SEQ ID NO: 206 - RNA, 23 nt, synthetic construct
  source 1..23: mol_type = other RNA
ttatacttaattggcttaatgta

SEQ ID NO: 207 - RNA, 21 nt, synthetic construct
  source 1..21: mol_type = other RNA
attaagccaattaagtataaa

SEQ ID NO: 208 - RNA, 23 nt, synthetic construct
  source 1..23: mol_type = other RNA
tttatacttaattggcttaatgt

SEQ ID NO: 209 - RNA, 21 nt, synthetic construct
  source 1..21: mol_type = other RNA
ttaagccaattaagtataaaa

SEQ ID NO: 210 - RNA, 23 nt, synthetic construct
  source 1..23: mol_type = other RNA
ttttatacttaattggcttaatg

SEQ ID NO: 211 - RNA, 21 nt, synthetic construct
  source 1..21: mol_type = other RNA
taagccaattaagtataaaga

SEQ ID NO: 212 - RNA, 23 nt, synthetic construct
  source 1..23: mol_type = other RNA
tctttatacttaattggcttaat

SEQ ID NO: 213 - RNA, 21 nt, synthetic construct
  source 1..21: mol_type = other RNA
aagccaattaagtataaaggt

SEQ ID NO: 214 - RNA, 23 nt, synthetic construct
  source 1..23: mol_type = other RNA
acctttatacttaattggcttaa

SEQ ID NO: 215 - RNA, 21 nt, synthetic construct
  source 1..21: mol_type = other RNA
agccaattaagtataaaggta

SEQ ID NO: 216 - RNA, 23 nt, synthetic construct
  source 1..23: mol_type = other RNA
tacctttatacttaattggctta

SEQ ID NO: 217 - RNA, 21 nt, synthetic construct
  source 1..21: mol_type = other RNA
acttggaactctattgccctt

SEQ ID NO: 218 - RNA, 23 nt, synthetic construct
  source 1..23: mol_type = other RNA
aagggcaatagagttccaagttt

SEQ ID NO: 219 - RNA, 21 nt, synthetic construct
  source 1..21: mol_type = other RNA
ttggaactctattgcccttga

SEQ ID NO: 220 - RNA, 23 nt, synthetic construct
  source 1..23: mol_type = other RNA
tcaagggcaatagagttccaagt

SEQ ID NO: 221 - RNA, 21 nt, synthetic construct
  source 1..21: mol_type = other RNA
gcccttgcagaaagtttatca

SEQ ID NO: 222 - RNA, 23 nt, synthetic construct
  source 1..23: mol_type = other RNA
tgataaactttctgcaagggcaa

SEQ ID NO: 223 - RNA, 21 nt, synthetic construct
  source 1..21: mol_type = other RNA
tcgcatgtgcacattgaaaaa

SEQ ID NO: 224 - RNA, 23 nt, synthetic construct
  source 1..23: mol_type = other RNA
tttttcaatgtgcacatgcgatt

SEQ ID NO: 225 - RNA, 21 nt, synthetic construct
  source 1..21: mol_type = other RNA
gcatgtgcacattgaaaacta

SEQ ID NO: 226 - RNA, 23 nt, synthetic construct
  source 1..23: mol_type = other RNA
tagttttcaatgtgcacatgcga

SEQ ID NO: 227 - RNA, 21 nt, synthetic construct
  source 1..21: mol_type = other RNA
catgtgcacattgaaaactgt

SEQ ID NO: 228 - RNA, 23 nt, synthetic construct
  source 1..23: mol_type = other RNA
acagttttcaatgtgcacatgcg

SEQ ID NO: 229 - RNA, 21 nt, synthetic construct
  source 1..21: mol_type = other RNA
atgtgcacattgaaaactgta

SEQ ID NO: 230 - RNA, 23 nt, synthetic construct
  source 1..23: mol_type = other RNA
tacagttttcaatgtgcacatgc

SEQ ID NO: 231 - RNA, 21 nt, synthetic construct
  source 1..21: mol_type = other RNA
atggtcagatcttcaaaataa

SEQ ID NO: 232 - RNA, 23 nt, synthetic construct
  source 1..23: mol_type = other RNA
ttattttgaagatctgaccattg

SEQ ID NO: 233 - RNA, 21 nt, synthetic construct
  source 1..21: mol_type = other RNA
aaatttgtgttcacaaaggaa

SEQ ID NO: 234 - RNA, 23 nt, synthetic construct
  source 1..23: mol_type = other RNA
ttcctttgtgaacacaaatttct

SEQ ID NO: 235 - RNA, 21 nt, synthetic construct
  source 1..21: mol_type = other RNA
atttgtgttcacaaaggaaaa

SEQ ID NO: 236 - RNA, 21 nt, synthetic construct
  source 1..21: mol_type = other RNA
  modified_base 1: mod_base = OTHER; note = 2'-O-methyluridine-3'-phosphorothioate
  modified_base 2: mod_base = OTHER; note = 2'-O-methyluridine-3'-phosphorothioate
  modified_base 3: mod_base = OTHER; note = 2'-O-methylguanosine-3'-phosphate
  modified_base 4: mod_base = OTHER; note = 2'-O-methyluridine-3'-phosphate
  modified_base 5: mod_base = OTHER; note = 2'-O-methylguanosine-3'-phosphate
  modified_base 6: mod_base = OTHER; note = 2'-O-methyluridine-3'-phosphate
  modified_base 7: mod_base = OTHER; note = 2'-deoxy-2'-fluorocytidine-3'-phosphate
  modified_base 8: mod_base = OTHER; note = 2'-O-methyluridine-3'-phosphate
  modified_base 9: mod_base = OTHER; note = 2'-deoxy-2'-fluorocytidine-3'-phosphate
  modified_base 10: mod_base = OTHER; note = 2'-deoxy-2'-fluoroadenosine-3'-phosphate
  modified_base 11: mod_base = OTHER; note = 2'-deoxy-2'-fluorocytidine-3'-phosphate
  modified_base 12: mod_base = OTHER; note = 2'-O-methyladenosine-3'-phosphate
  modified_base 13: mod_base = OTHER; note = 2'-O-methylcytidine-3'-phosphate
  modified_base 14: mod_base = OTHER; note = 2'-O-methyluridine-3'-phosphate
  modified_base 15: mod_base = OTHER; note = 2'-O-methyladenosine-3'-phosphate
  modified_base 16: mod_base = OTHER; note = 2'-O-methyladenosine-3'-phosphate
  modified_base 17: mod_base = OTHER; note = 2'-O-methyladenosine-3'-phosphate
  modified_base 18: mod_base = OTHER; note = 2'-O-methylguanosine-3'-phosphate
  modified_base 19: mod_base = OTHER; note = 2'-O-methyladenosine-3'-phosphate
  modified_base 20: mod_base = OTHER; note = 2'-O-methyladenosine-3'-phosphate
  modified_base 21: mod_base = OTHER; note = 2'-O-methyladenosine-3'-phosphate
ttgtgtctcacactaaagaaa

SEQ ID NO: 237 - RNA, 23 nt, synthetic construct
  source 1..23: mol_type = other RNA
  modified_base 1: mod_base = OTHER; note = 2'-O-methyluridine-3'-phosphorothioate
  modified_base 2: mod_base = OTHER; note = 2'-deoxy-2'-fluorouridine-3'-phosphorothioate
  modified_base 3: mod_base = OTHER; note = 2'-O-methyluridine-3'-phosphate
  modified_base 4: mod_base = OTHER; note = 2'-O-methylcytidine-3'-phosphate
  modified_base 5: mod_base = OTHER; note = 2'-O-methyluridine-3'-phosphate
  modified_base 6: mod_base = OTHER; note = 2'-deoxy-2'-fluorouridine-3'-phosphate
  modified_base 7: mod_base = OTHER; note = 2'-O-methyluridine-3'-phosphate
  modified_base 8: mod_base = OTHER; note = 2'-deoxy-2'-fluoroadenosine-3'-phosphate
  modified_base 9: mod_base = OTHER; note = 2'-deoxy-2'-fluoroguanosine-3'-phosphate
  modified_base 10: mod_base = OTHER; note = 2'-O-methyluridine-3'-phosphate
  modified_base 11: mod_base = OTHER; note = 2'-O-methylguanosine-3'-phosphate
  modified_base 12: mod_base = OTHER; note = 2'-O-methyluridine-3'-phosphate
  modified_base 13: mod_base = OTHER; note = 2'-O-methylguanosine-3'-phosphate
  modified_base 14: mod_base = OTHER; note = 2'-deoxy-2'-fluoroadenosine-3'-phosphate
  modified_base 15: mod_base = OTHER; note = 2'-O-methylguanosine-3'-phosphate
  modified_base 16: mod_base = OTHER; note = 2'-deoxy-2'-fluoroadenosine-3'-phosphate
  modified_base 17: mod_base = OTHER; note = 2'-O-methylcytidine-3'-phosphate
  modified_base 18: mod_base = OTHER; note = 2'-O-methyladenosine-3'-phosphate
  modified_base 19: mod_base = OTHER; note = 2'-O-methylcytidine-3'-phosphate
  modified_base 20: mod_base = OTHER; note = 2'-O-methyladenosine-3'-phosphate
  modified_base 21: mod_base = OTHER; note = 2'-O-methyladenosine-3'-phosphorothioate
  modified_base 22: mod_base = OTHER; note = 2'-O-methyladenosine-3'-phosphorothioate
  modified_base 23: mod_base = OTHER; note = 2'-O-methyladenosine
tttctttagtgtgagacacaaaa

SEQ ID NO: 238 - RNA, 21 nt, synthetic construct
  source 1..21: mol_type = other RNA
  modified_base 1: mod_base = OTHER; note = 2'-O-methylguanosine-3'-phosphorothioate
  modified_base 2: mod_base = OTHER; note = 2'-O-methyluridine-3'-phosphorothioate
  modified_base 3: mod_base = OTHER; note = 2'-O-methylguanosine-3'-phosphate
  modified_base 4: mod_base = OTHER; note = 2'-O-methyluridine-3'-phosphate
  modified_base 5: mod_base = OTHER; note = 2'-O-methylcytidine-3'-phosphate
  modified_base 6: mod_base = OTHER; note = 2'-O-methyluridine-3'-phosphate
  modified_base 7: mod_base = OTHER; note = 2'-deoxy-2'-fluorocytidine-3'-phosphate
  modified_base 8: mod_base = OTHER; note = 2'-O-methyladenosine-3'-phosphate
  modified_base 9: mod_base = OTHER; note = 2'-deoxy-2'-fluorocytidine-3'-phosphate
  modified_base 10: mod_base = OTHER; note = 2'-deoxy-2'-fluoroadenosine-3'-phosphate
  modified_base 11: mod_base = OTHER; note = 2'-deoxy-2'-fluorocytidine-3'-phosphate
  modified_base 12: mod_base = OTHER; note = 2'-O-methyluridine-3'-phosphate
  modified_base 13: mod_base = OTHER; note = 2'-O-methyladenosine-3'-phosphate
  modified_base 14: mod_base = OTHER; note = 2'-O-methyladenosine-3'-phosphate
  modified_base 15: mod_base = OTHER; note = 2'-O-methyladenosine-3'-phosphate
  modified_base 16: mod_base = OTHER; note = 2'-O-methylguanosine-3'-phosphate
  modified_base 17: mod_base = OTHER; note = 2'-O-methyladenosine-3'-phosphate
  modified_base 18: mod_base = OTHER; note = 2'-O-methyladenosine-3'-phosphate
  modified_base 19: mod_base = OTHER; note = 2'-O-methyladenosine-3'-phosphate
  modified_base 20: mod_base = OTHER; note = 2'-O-methyluridine-3'-phosphate
  modified_base 21: mod_base = OTHER; note = 2'-O-methyladenosine-3'-phosphate
gtgtctcacactaaagaaata

SEQ ID NO: 239 - RNA, 23 nt, synthetic construct
  source 1..23: mol_type = other RNA
  modified_base 1: mod_base = OTHER; note = 2'-O-methyluridine-3'-phosphorothioate
  modified_base 2: mod_base = OTHER; note = 2'-deoxy-2'-fluoroadenosine-3'-phosphorothioate
  modified_base 3: mod_base = OTHER; note = 2'-O-methyluridine-3'-phosphate
  modified_base 4: mod_base = OTHER; note = 2'-O-methyluridine-3'-phosphate
  modified_base 5: mod_base = OTHER; note = 2'-O-methyluridine-3'-phosphate
  modified_base 6: mod_base = OTHER; note = 2'-deoxy-2'-fluorocytidine-3'-phosphate
  modified_base 7: mod_base = OTHER; note = 2'-O-methyluridine-3'-phosphate
  modified_base 8: mod_base = OTHER; note = 2'-deoxy-2'-fluorouridine-3'-phosphate
  modified_base 9: mod_base = OTHER; note = 2'-deoxy-2'-fluorouridine-3'-phosphate
  modified_base 10: mod_base = OTHER; note = 2'-O-methyladenosine-3'-phosphate
  modified_base 11: mod_base = OTHER; note = 2'-O-methylguanosine-3'-phosphate
  modified_base 12: mod_base = OTHER; note = 2'-O-methyluridine-3'-phosphate
  modified_base 13: mod_base = OTHER; note = 2'-O-methylguanosine-3'-phosphate
  modified_base 14: mod_base = OTHER; note = 2'-deoxy-2'-fluorouridine-3'-phosphate
  modified_base 15: mod_base = OTHER; note = 2'-O-methylguanosine-3'-phosphate
  modified_base 16: mod_base = OTHER; note = 2'-deoxy-2'-fluoroadenosine-3'-phosphate
  modified_base 17: mod_base = OTHER; note = 2'-O-methylguanosine-3'-phosphate
  modified_base 18: mod_base = OTHER; note = 2'-O-methyladenosine-3'-phosphate
  modified_base 19: mod_base = OTHER; note = 2'-O-methylcytidine-3'-phosphate
  modified_base 20: mod_base = OTHER; note = 2'-O-methyladenosine-3'-phosphate
  modified_base 21: mod_base = OTHER; note = 2'-O-methylcytidine-3'-phosphorothioate
  modified_base 22: mod_base = OTHER; note = 2'-O-methyladenosine-3'-phosphorothioate
  modified_base 23: mod_base = OTHER; note = 2'-O-methyladenosine
tatttctttagtgtgagacacaa

SEQ ID NO: 240 - RNA, 21 nt, synthetic construct
  source 1..21: mol_type = other RNA
  modified_base 1: mod_base = OTHER; note = 2'-O-methyladenosine-3'-phosphorothioate
  modified_base 2: mod_base = OTHER; note = 2'-O-methyladenosine-3'-phosphorothioate
  modified_base 3: mod_base = OTHER; note = 2'-O-methyluridine-3'-phosphate
  modified_base 4: mod_base = OTHER; note = 2'-O-methyluridine-3'-phosphate
  modified_base 5: mod_base = OTHER; note = 2'-O-methylcytidine-3'-phosphate
  modified_base 6: mod_base = OTHER; note = 2'-O-methyluridine-3'-phosphate
  modified_base 7: mod_base = OTHER; note = 2'-deoxy-2'-fluoroadenosine-3'-phosphate
  modified_base 8: mod_base = OTHER; note = 2'-O-methyladenosine-3'-phosphate
  modified_base 9: mod_base = OTHER; note = 2'-deoxy-2'-fluoroguanosine-3'-phosphate
  modified_base 10: mod_base = OTHER; note = 2'-deoxy-2'-fluoroguanosine-3'-phosphate
  modified_base 11: mod_base = OTHER; note = 2'-deoxy-2'-fluorocytidine-3'-phosphate
  modified_base 12: mod_base = OTHER; note = 2'-O-methyluridine-3'-phosphate
  modified_base 13: mod_base = OTHER; note = 2'-O-methyladenosine-3'-phosphate
  modified_base 14: mod_base = OTHER; note = 2'-O-methyladenosine-3'-phosphate
  modified_base 15: mod_base = OTHER; note = 2'-O-methyladenosine-3'-phosphate
  modified_base 16: mod_base = OTHER; note = 2'-O-methyluridine-3'-phosphate
  modified_base 17: mod_base = OTHER; note = 2'-O-methyladenosine-3'-phosphate
  modified_base 18: mod_base = OTHER; note = 2'-O-methylguanosine-3'-phosphate
  modified_base 19: mod_base = OTHER; note = 2'-O-methylcytidine-3'-phosphate
  modified_base 20: mod_base = OTHER; note = 2'-O-methyluridine-3'-phosphate
  modified_base 21: mod_base = OTHER; note = 2'-O-methyladenosine-3'-phosphate
aattctaaggctaaatagcta

SEQ ID NO: 241 - RNA, 23 nt, synthetic construct
  source 1..23: mol_type = other RNA
  modified_base 1: mod_base = OTHER; note = 2'-O-methyluridine-3'-phosphorothioate
  modified_base 2: mod_base = OTHER; note = 2'-deoxy-2'-fluoroadenosine-3'-phosphorothioate
  modified_base 3: mod_base = OTHER; note = 2'-O-methylguanosine-3'-phosphate
  modified_base 4: mod_base = OTHER; note = 2'-O-methylcytidine-3'-phosphate
  modified_base 5: mod_base = OTHER; note = 2'-O-methyluridine-3'-phosphate
  modified_base 6: mod_base = OTHER; note = 2'-deoxy-2'-fluoroadenosine-3'-phosphate
  modified_base 7: mod_base = OTHER; note = 2'-O-methyluridine-3'-phosphate
  modified_base 8: mod_base = OTHER; note = 2'-deoxy-2'-fluorouridine-3'-phosphate
  modified_base 9: mod_base = OTHER; note = 2'-deoxy-2'-fluorouridine-3'-phosphate
  modified_base 10: mod_base = OTHER; note = 2'-O-methyladenosine-3'-phosphate
  modified_base 11: mod_base = OTHER; note = 2'-O-methylguanosine-3'-phosphate
  modified_base 12: mod_base = OTHER; note = 2'-O-methylcytidine-3'-phosphate
  modified_base 13: mod_base = OTHER; note = 2'-O-methylcytidine-3'-phosphate
  modified_base 14: mod_base = OTHER; note = 2'-deoxy-2'-fluorouridine-3'-phosphate
  modified_base 15: mod_base = OTHER; note = 2'-O-methyluridine-3'-phosphate
  modified_base 16: mod_base = OTHER; note = 2'-deoxy-2'-fluoroadenosine-3'-phosphate
  modified_base 17: mod_base = OTHER; note = 2'-O-methylguanosine-3'-phosphate
  modified_base 18: mod_base = OTHER; note = 2'-O-methyladenosine-3'-phosphate
  modified_base 19: mod_base = OTHER; note = 2'-O-methyladenosine-3'-phosphate
  modified_base 20: mod_base = OTHER; note = 2'-O-methyluridine-3'-phosphate
  modified_base 21: mod_base = OTHER; note = 2'-O-methyluridine-3'-phosphorothioate
  modified_base 22: mod_base = OTHER; note = 2'-O-methylcytidine-3'-phosphorothioate
  modified_base 23: mod_base = OTHER; note = 2'-O-methyluridine
tagctatttagccttagaattct

SEQ ID NO: 242 - RNA, 21 nt, synthetic construct
  source 1..21: mol_type = other RNA
  modified_base 1: mod_base = OTHER; note = 2'-O-methylguanosine-3'-phosphorothioate
  modified_base 2: mod_base = OTHER; note = 2'-O-methylguanosine-3'-phosphorothioate
  modified_base 3: mod_base = OTHER; note = 2'-O-methyladenosine-3'-phosphate
  modified_base 4: mod_base = OTHER; note = 2'-O-methyladenosine-3'-phosphate
  modified_base 5: mod_base = OTHER; note = 2'-O-methylguanosine-3'-phosphate
  modified_base 6: mod_base = OTHER; note = 2'-O-methyluridine-3'-phosphate
  modified_base 7: mod_base = OTHER; note = 2'-deoxy-2'-fluoroadenosine-3'-phosphate
  modified_base 8: mod_base = OTHER; note = 2'-O-methyluridine-3'-phosphate
  modified_base 9: mod_base = OTHER; note = 2'-deoxy-2'-fluorouridine-3'-phosphate
  modified_base 10: mod_base = OTHER; note = 2'-deoxy-2'-fluorocytidine-3'-phosphate
  modified_base 11: mod_base = OTHER; note = 2'-deoxy-2'-fluoroadenosine-3'-phosphate
  modified_base 12: mod_base = OTHER; note = 2'-O-methyluridine-3'-phosphate
  modified_base 13: mod_base = OTHER; note = 2'-O-methyluridine-3'-phosphate
  modified_base 14: mod_base = OTHER; note = 2'-O-methylcytidine-3'-phosphate
  modified_base 15: mod_base = OTHER; note = 2'-O-methyladenosine-3'-phosphate
  modified_base 16: mod_base = OTHER; note = 2'-O-methyladenosine-3'-phosphate
  modified_base 17: mod_base = OTHER; note = 2'-O-methyladenosine-3'-phosphate
  modified_base 18: mod_base = OTHER; note = 2'-O-methylcytidine-3'-phosphate
  modified_base 19: mod_base = OTHER; note = 2'-O-methyluridine-3'-phosphate
  modified_base 20: mod_base = OTHER; note = 2'-O-methyluridine-3'-phosphate
  modified_base 21: mod_base = OTHER; note = 2'-O-methyladenosine-3'-phosphate
ggaagtattcattcaaactta

SEQ ID NO: 243 - RNA, 23 nt, synthetic construct
  source 1..23: mol_type = other RNA
  modified_base 1: mod_base = OTHER; note = 2'-O-methyluridine-3'-phosphorothioate
  modified_base 2: mod_base = OTHER; note = 2'-deoxy-2'-fluoroadenosine-3'-phosphorothioate
  modified_base 3: mod_base = OTHER; note = 2'-O-methyladenosine-3'-phosphate
  modified_base 4: mod_base = OTHER; note = 2'-O-methylguanosine-3'-phosphate
  modified_base 5: mod_base = OTHER; note = 2'-O-methyluridine-3'-phosphate
  modified_base 6: mod_base = OTHER; note = 2'-deoxy-2'-fluorouridine-3'-phosphate
  modified_base 7: mod_base = OTHER; note = 2'-O-methyluridine-3'-phosphate
  modified_base 8: mod_base = OTHER; note = 2'-deoxy-2'-fluoroguanosine-3'-phosphate
  modified_base 9: mod_base = OTHER; note = 2'-deoxy-2'-fluoroadenosine-3'-phosphate
  modified_base 10: mod_base = OTHER; note = 2'-O-methyladenosine-3'-phosphate
  modified_base 11: mod_base = OTHER; note = 2'-O-methyluridine-3'-phosphate
  modified_base 12: mod_base = OTHER; note = 2'-O-methylguanosine-3'-phosphate
  modified_base 13: mod_base = OTHER; note = 2'-O-methyladenosine-3'-phosphate
  modified_base 14: mod_base = OTHER; note = 2'-deoxy-2'-fluoroadenosine-3'-phosphate
  modified_base 15: mod_base = OTHER; note = 2'-O-methyluridine-3'-phosphate
  modified_base 16: mod_base = OTHER; note = 2'-deoxy-2'-fluoroadenosine-3'-phosphate
  modified_base 17: mod_base = OTHER; note = 2'-O-methylcytidine-3'-phosphate
  modified_base 18: mod_base = OTHER; note = 2'-O-methyluridine-3'-phosphate
  modified_base 19: mod_base = OTHER; note = 2'-O-methyluridine-3'-phosphate
  modified_base 20: mod_base = OTHER; note = 2'-O-methylcytidine-3'-phosphate
  modified_base 21: mod_base = OTHER; note = 2'-O-methylcytidine-3'-phosphorothioate
  modified_base 22: mod_base = OTHER; note = 2'-O-methyluridine-3'-phosphorothioate
  modified_base 23: mod_base = OTHER; note = 2'-O-methyladenosine
taagtttgaatgaatacttccta

SEQ ID NO: 244 - RNA, 21 nt, synthetic construct
  source 1..21: mol_type = other RNA
  modified_base 1: mod_base = OTHER; note = 2'-O-methyluridine-3'-phosphorothioate
  modified_base 2: mod_base = OTHER; note = 2'-O-methyluridine-3'-phosphorothioate
  modified_base 3: mod_base = OTHER; note = 2'-O-methylcytidine-3'-phosphate
  modified_base 4: mod_base = OTHER; note = 2'-O-methyladenosine-3'-phosphate
  modified_base 5: mod_base = OTHER; note = 2'-O-methyluridine-3'-phosphate
  modified_base 6: mod_base = OTHER; note = 2'-O-methyluridine-3'-phosphate
  modified_base 7: mod_base = OTHER; note = 2'-deoxy-2'-fluorocytidine-3'-phosphate
  modified_base 8: mod_base = OTHER; note = 2'-O-methyladenosine-3'-phosphate
  modified_base 9: mod_base = OTHER; note = 2'-deoxy-2'-fluoroadenosine-3'-phosphate
  modified_base 10: mod_base = OTHER; note = 2'-deoxy-2'-fluoroadenosine-3'-phosphate
  modified_base 11: mod_base = OTHER; note = 2'-deoxy-2'-fluorocytidine-3'-phosphate
  modified_base 12: mod_base = OTHER; note = 2'-O-methyluridine-3'-phosphate
  modified_base 13: mod_base = OTHER; note = 2'-O-methyluridine-3'-phosphate
  modified_base 14: mod_base = OTHER; note = 2'-O-methylguanosine-3'-phosphate
  modified_base 15: mod_base = OTHER; note = 2'-O-methyladenosine-3'-phosphate
  modified_base 16: mod_base = OTHER; note = 2'-O-methyladenosine-3'-phosphate
  modified_base 17: mod_base = OTHER; note = 2'-O-methyluridine-3'-phosphate
  modified_base 18: mod_base = OTHER; note = 2'-O-methyladenosine-3'-phosphate
  modified_base 19: mod_base = OTHER; note = 2'-O-methyluridine-3'-phosphate
  modified_base 20: mod_base = OTHER; note = 2'-O-methyluridine-3'-phosphate
  modified_base 21: mod_base = OTHER; note = 2'-O-methyladenosine-3'-phosphate
ttcattcaaacttgaatatta

SEQ ID NO: 245 - RNA, 23 nt, synthetic construct
  source 1..23: mol_type = other RNA
  modified_base 1: mod_base = OTHER; note = 2'-O-methyluridine-3'-phosphorothioate
  modified_base 2: mod_base = OTHER; note = 2'-deoxy-2'-fluoroadenosine-3'-phosphorothioate
  modified_base 3: mod_base = OTHER; note = 2'-O-methyladenosine-3'-phosphate
  modified_base 4: mod_base = OTHER; note = 2'-O-methyluridine-3'-phosphate
  modified_base 5: mod_base = OTHER; note = 2'-O-methyladenosine-3'-phosphate
  modified_base 6: mod_base = OTHER; note = 2'-deoxy-2'-fluorouridine-3'-phosphate
  modified_base 7: mod_base = OTHER; note = 2'-O-methyluridine-3'-phosphate
  modified_base 8: mod_base = OTHER; note = 2'-deoxy-2'-fluorocytidine-3'-phosphate
  modified_base 9: mod_base = OTHER; note = 2'-deoxy-2'-fluoroadenosine-3'-phosphate
  modified_base 10: mod_base = OTHER; note = 2'-O-methyladenosine-3'-phosphate
  modified_base 11: mod_base = OTHER; note = 2'-O-methylguanosine-3'-phosphate
  modified_base 12: mod_base = OTHER; note = 2'-O-methyluridine-3'-phosphate
  modified_base 13: mod_base = OTHER; note = 2'-O-methyluridine-3'-phosphate
  modified_base 14: mod_base = OTHER; note = 2'-deoxy-2'-fluorouridine-3'-phosphate
  modified_base 15: mod_base = OTHER; note = 2'-O-methylguanosine-3'-phosphate
  modified_base 16: mod_base = OTHER; note = 2'-deoxy-2'-fluoroadenosine-3'-phosphate
  modified_base 17: mod_base = OTHER; note = 2'-O-methyladenosine-3'-phosphate
  modified_base 18: mod_base = OTHER; note = 2'-O-methyluridine-3'-phosphate
  modified_base 19: mod_base = OTHER; note = 2'-O-methylguanosine-3'-phosphate
  modified_base 20: mod_base = OTHER; note = 2'-O-methyladenosine-3'-phosphate
  modified_base 21: mod_base = OTHER; note = 2'-O-methyladenosine-3'-phosphorothioate
  modified_base 22: mod_base = OTHER; note = 2'-O-methyluridine-3'-phosphorothioate
  modified_base 23: mod_base = OTHER; note = 2'-O-methyladenosine
taatattcaagtttgaatgaata

SEQ ID NO: 246 - RNA, 21 nt, synthetic construct
  source 1..21: mol_type = other RNA
  modified_base 1: mod_base = OTHER; note = 2'-O-methyluridine-3'-phosphorothioate
  modified_base 2: mod_base = OTHER; note = 2'-O-methylcytidine-3'-phosphorothioate
  modified_base 3: mod_base = OTHER; note = 2'-O-methyladenosine-3'-phosphate
  modified_base 4: mod_base = OTHER; note = 2'-O-methyluridine-3'-phosphate
  modified_base 5: mod_base = OTHER; note = 2'-O-methyluridine-3'-phosphate
  modified_base 6: mod_base = OTHER; note = 2'-O-methylcytidine-3'-phosphate
  modified_base 7: mod_base = OTHER; note = 2'-deoxy-2'-fluoroadenosine-3'-phosphate
  modified_base 8: mod_base = OTHER; note = 2'-O-methyladenosine-3'-phosphate
  modified_base 9: mod_base = OTHER; note = 2'-deoxy-2'-fluoroadenosine-3'-phosphate
  modified_base 10: mod_base = OTHER; note = 2'-deoxy-2'-fluorocytidine-3'-phosphate
  modified_base 11: mod_base = OTHER; note = 2'-deoxy-2'-fluorouridine-3'-phosphate
  modified_base 12: mod_base = OTHER; note = 2'-O-methyluridine-3'-phosphate
  modified_base 13: mod_base = OTHER; note = 2'-O-methylguanosine-3'-phosphate
  modified_base 14: mod_base = OTHER; note = 2'-O-methyladenosine-3'-phosphate
  modified_base 15: mod_base = OTHER; note = 2'-O-methyladenosine-3'-phosphate
  modified_base 16: mod_base = OTHER; note = 2'-O-methyluridine-3'-phosphate
  modified_base 17: mod_base = OTHER; note = 2'-O-methyladenosine-3'-phosphate
  modified_base 18: mod_base = OTHER; note = 2'-O-methyluridine-3'-phosphate
  modified_base 19: mod_base = OTHER; note = 2'-O-methyluridine-3'-phosphate
  modified_base 20: mod_base = OTHER; note = 2'-O-methylcytidine-3'-phosphate
  modified_base 21: mod_base = OTHER; note = 2'-O-methyladenosine-3'-phosphate
tcattcaaacttgaatattca

SEQ ID NO: 247 - RNA, 23 nt, synthetic construct
  source 1..23: mol_type = other RNA
  modified_base 1: mod_base = OTHER; note = 2'-O-methyluridine-3'-phosphorothioate
  modified_base 2: mod_base = OTHER; note = 2'-deoxy-2'-fluoroguanosine-3'-phosphorothioate
  modified_base 3: mod_base = OTHER; note = 2'-O-methyladenosine-3'-phosphate
  modified_base 4: mod_base = OTHER; note = 2'-O-methyladenosine-3'-phosphate
  modified_base 5: mod_base = OTHER; note = 2'-O-methyluridine-3'-phosphate
  modified_base 6: mod_base = OTHER; note = 2'-deoxy-2'-fluoroadenosine-3'-phosphate
  modified_base 7: mod_base = OTHER; note = 2'-O-methyluridine-3'-phosphate
  modified_base 8: mod_base = OTHER; note = 2'-deoxy-2'-fluorouridine-3'-phosphate
  modified_base 9: mod_base = OTHER; note = 2'-deoxy-2'-fluorocytidine-3'-phosphate
  modified_base 10: mod_base = OTHER; note = 2'-O-methyladenosine-3'-phosphate
  modified_base 11: mod_base = OTHER; note = 2'-O-methyladenosine-3'-phosphate
  modified_base 12: mod_base = OTHER; note = 2'-O-methylguanosine-3'-phosphate
  modified_base 13: mod_base = OTHER; note = 2'-O-methyluridine-3'-phosphate
  modified_base 14: mod_base = OTHER; note = 2'-deoxy-2'-fluorouridine-3'-phosphate
  modified_base 15: mod_base = OTHER; note = 2'-O-methyluridine-3'-phosphate
  modified_base 16: mod_base = OTHER; note = 2'-deoxy-2'-fluoroguanosine-3'-phosphate
  modified_base 17: mod_base = OTHER; note = 2'-O-methyladenosine-3'-phosphate
  modified_base 18: mod_base = OTHER; note = 2'-O-methyladenosine-3'-phosphate
  modified_base 19: mod_base = OTHER; note = 2'-O-methyluridine-3'-phosphate
  modified_base 20: mod_base = OTHER; note = 2'-O-methylguanosine-3'-phosphate
  modified_base 21: mod_base = OTHER; note = 2'-O-methyladenosine-3'-phosphorothioate
  modified_base 22: mod_base = OTHER; note = 2'-O-methyladenosine-3'-phosphorothioate
  modified_base 23: mod_base = OTHER; note = 2'-O-methyluridine
tgaatattcaagtttgaatgaat

SEQ ID NO: 248 - RNA, 21 nt, synthetic construct
  source 1..21: mol_type = other RNA
  modified_base 1: mod_base = OTHER; note = 2'-O-methylcytidine-3'-phosphorothioate
  modified_base 2: mod_base = OTHER; note = 2'-O-methyladenosine-3'-phosphorothioate
  modified_base 3: mod_base = OTHER; note = 2'-O-methyluridine-3'-phosphate
  modified_base 4: mod_base = OTHER; note = 2'-O-methyluridine-3'-phosphate
  modified_base 5: mod_base = OTHER; note = 2'-O-methylcytidine-3'-phosphate
  modified_base 6: mod_base = OTHER; note = 2'-O-methyladenosine-3'-phosphate
  modified_base 7: mod_base = OTHER; note = 2'-deoxy-2'-fluoroadenosine-3'-phosphate
  modified_base 8: mod_base = OTHER; note = 2'-O-methyladenosine-3'-phosphate
  modified_base 9: mod_base = OTHER; note = 2'-deoxy-2'-fluorocytidine-3'-phosphate
  modified_base 10: mod_base = OTHER; note = 2'-deoxy-2'-fluorouridine-3'-phosphate
  modified_base 11: mod_base = OTHER; note = 2'-deoxy-2'-fluorouridine-3'-phosphate
  modified_base 12: mod_base = OTHER; note = 2'-O-methylguanosine-3'-phosphate
  modified_base 13: mod_base = OTHER; note = 2'-O-methyladenosine-3'-phosphate
  modified_base 14: mod_base = OTHER; note = 2'-O-methyladenosine-3'-phosphate
  modified_base 15: mod_base = OTHER; note = 2'-O-methyluridine-3'-phosphate
  modified_base 16: mod_base = OTHER; note = 2'-O-methyladenosine-3'-phosphate
  modified_base 17: mod_base = OTHER; note = 2'-O-methyluridine-3'-phosphate
  modified_base 18: mod_base = OTHER; note = 2'-O-methyluridine-3'-phosphate
  modified_base 19: mod_base = OTHER; note = 2'-O-methylcytidine-3'-phosphate
  modified_base 20: mod_base = OTHER; note = 2'-O-methyluridine-3'-phosphate
  modified_base 21: mod_base = OTHER; note = 2'-O-methyladenosine-3'-phosphate
cattcaaacttgaatattcta

SEQ ID NO: 249 - RNA, 23 nt, synthetic construct
  source 1..23: mol_type = other RNA
  modified_base 1: mod_base = OTHER; note = 2'-O-methyluridine-3'-phosphorothioate
  modified_base 2: mod_base = OTHER; note = 2'-deoxy-2'-fluoroadenosine-3'-phosphorothioate
  modified_base 3: mod_base = OTHER; note = 2'-O-methylguanosine-3'-phosphate
  modified_base 4: mod_base = OTHER; note = 2'-O-methyladenosine-3'-phosphate
  modified_base 5: mod_base = OTHER; note = 2'-O-methyladenosine-3'-phosphate
  modified_base 6: mod_base = OTHER; note = 2'-deoxy-2'-fluorouridine-3'-phosphate
  modified_base 7: mod_base = OTHER; note = 2'-O-methyladenosine-3'-phosphate
  modified_base 8: mod_base = OTHER; note = 2'-deoxy-2'-fluorouridine-3'-phosphate
  modified_base 9: mod_base = OTHER; note = 2'-deoxy-2'-fluorouridine-3'-phosphate
  modified_base 10: mod_base = OTHER; note = 2'-O-methylcytidine-3'-phosphate
  modified_base 11: mod_base = OTHER; note = 2'-O-methyladenosine-3'-phosphate
  modified_base 12: mod_base = OTHER; note = 2'-O-methyladenosine-3'-phosphate
  modified_base 13: mod_base = OTHER; note = 2'-O-methylguanosine-3'-phosphate
  modified_base 14: mod_base = OTHER; note = 2'-deoxy-2'-fluorouridine-3'-phosphate
  modified_base 15: mod_base = OTHER; note = 2'-O-methyluridine-3'-phosphate
  modified_base 16: mod_base = OTHER; note = 2'-deoxy-2'-fluorouridine-3'-phosphate
  modified_base 17: mod_base = OTHER; note = 2'-O-methylguanosine-3'-phosphate
  modified_base 18: mod_base = OTHER; note = 2'-O-methyladenosine-3'-phosphate
  modified_base 19: mod_base = OTHER; note = 2'-O-methyladenosine-3'-phosphate
  modified_base 20: mod_base = OTHER; note = 2'-O-methyluridine-3'-phosphate
  modified_base 21: mod_base = OTHER; note = 2'-O-methylguanosine-3'-phosphorothioate
  modified_base 22: mod_base = OTHER; note = 2'-O-methyladenosine-3'-phosphorothioate
  modified_base 23: mod_base = OTHER; note = 2'-O-methyladenosine
tagaatattcaagtttgaatgaa

SEQ ID NO: 250 - RNA, 21 nt, synthetic construct
  source 1..21: mol_type = other RNA
  modified_base 1: mod_base = OTHER; note = 2'-O-methyluridine-3'-phosphorothioate
  modified_base 2: mod_base = OTHER; note = 2'-O-methylcytidine-3'-phosphorothioate
  modified_base 3: mod_base = OTHER; note = 2'-O-methyladenosine-3'-phosphate
  modified_base 4: mod_base = OTHER; note = 2'-O-methyladenosine-3'-phosphate
  modified_base 5: mod_base = OTHER; note = 2'-O-methyladenosine-3'-phosphate
  modified_base 6: mod_base = OTHER; note = 2'-O-methylcytidine-3'-phosphate
  modified_base 7: mod_base = OTHER; note = 2'-deoxy-2'-fluorouridine-3'-phosphate
  modified_base 8: mod_base = OTHER; note = 2'-O-methyluridine-3'-phosphate
  modified_base 9: mod_base = OTHER; note = 2'-deoxy-2'-fluoroguanosine-3'-phosphate
  modified_base 10: mod_base = OTHER; note = 2'-deoxy-2'-fluoroadenosine-3'-phosphate
  modified_base 11: mod_base = OTHER; note = 2'-deoxy-2'-fluoroadenosine-3'-phosphate
  modified_base 12: mod_base = OTHER; note = 2'-O-methyluridine-3'-phosphate
  modified_base 13: mod_base = OTHER; note = 2'-O-methyladenosine-3'-phosphate
  modified_base 14: mod_base = OTHER; note = 2'-O-methyluridine-3'-phosphate
  modified_base 15: mod_base = OTHER; note = 2'-O-methyluridine-3'-phosphate
  modified_base 16: mod_base = OTHER; note = 2'-O-methylcytidine-3'-phosphate
  modified_base 17: mod_base = OTHER; note = 2'-O-methyluridine-3'-phosphate
  modified_base 18: mod_base = OTHER; note = 2'-O-methyluridine-3'-phosphate
  modified_base 19: mod_base = OTHER; note = 2'-O-methylcytidine-3'-phosphate
  modified_base 20: mod_base = OTHER; note = 2'-O-methyladenosine-3'-phosphate
  modified_base 21: mod_base = OTHER; note = 2'-O-methyladenosine-3'-phosphate
tcaaacttgaatattcttcaa

SEQ ID NO: 251 - RNA, 23 nt, synthetic construct
  source 1..23: mol_type = other RNA
  modified_base 1: mod_base = OTHER; note = 2'-O-methyluridine-3'-phosphorothioate
  modified_base 2: mod_base = OTHER; note = 2'-deoxy-2'-fluorouridine-3'-phosphorothioate
  modified_base 3: mod_base = OTHER; note = 2'-O-methylguanosine-3'-phosphate
  modified_base 4: mod_base = OTHER; note = 2'-O-methyladenosine-3'-phosphate
  modified_base 5: mod_base = OTHER; note = 2'-O-methyladenosine-3'-phosphate
  modified_base 6: mod_base = OTHER; note = 2'-deoxy-2'-fluoroguanosine-3'-phosphate
  modified_base 7: mod_base = OTHER; note = 2'-O-methyladenosine-3'-phosphate
  modified_base 8: mod_base = OTHER; note = 2'-deoxy-2'-fluoroadenosine-3'-phosphate
  modified_base 9: mod_base = OTHER; note = 2'-deoxy-2'-fluorouridine-3'-phosphate
  modified_base 10: mod_base = OTHER; note = 2'-O-methyladenosine-3'-phosphate
  modified_base 11: mod_base = OTHER; note = 2'-O-methyluridine-3'-phosphate
  modified_base 12: mod_base = OTHER; note = 2'-O-methyluridine-3'-phosphate
  modified_base 13: mod_base = OTHER; note = 2'-O-methylcytidine-3'-phosphate
  modified_base 14: mod_base = OTHER; note = 2'-deoxy-2'-fluoroadenosine-3'-phosphate
  modified_base 15: mod_base = OTHER; note = 2'-O-methyladenosine-3'-phosphate
  modified_base 16: mod_base = OTHER; note = 2'-deoxy-2'-fluoroguanosine-3'-phosphate
  modified_base 17: mod_base = OTHER; note = 2'-O-methyluridine-3'-phosphate
  modified_base 18: mod_base = OTHER; note = 2'-O-methyluridine-3'-phosphate
  modified_base 19: mod_base = OTHER; note = 2'-O-methyluridine-3'-phosphate
  modified_base 20: mod_base = OTHER; note = 2'-O-methylguanosine-3'-phosphate
  modified_base 21: mod_base = OTHER; note = 2'-O-methyladenosine-3'-phosphorothioate
  modified_base 22: mod_base = OTHER; note = 2'-O-methyladenosine-3'-phosphorothioate
  modified_base 23: mod_base = OTHER; note = 2'-O-methyluridine
ttgaagaatattcaagtttgaat

SEQ ID NO: 252 - RNA, 21 nt, synthetic construct
  source 1..21: mol_type = other RNA
  modified_base 1: mod_base = OTHER; note = 2'-O-methylcytidine-3'-phosphorothioate
  modified_base 2: mod_base = OTHER; note = 2'-O-methyladenosine-3'-phosphorothioate
  modified_base 3: mod_base = OTHER; note = 2'-O-methyladenosine-3'-phosphate
  modified_base 4: mod_base = OTHER; note = 2'-O-methyladenosine-3'-phosphate
  modified_base 5: mod_base = OTHER; note = 2'-O-methylcytidine-3'-phosphate
  modified_base 6: mod_base = OTHER; note = 2'-O-methyluridine-3'-phosphate
  modified_base 7: mod_base = OTHER; note = 2'-deoxy-2'-fluorouridine-3'-phosphate
  modified_base 8: mod_base = OTHER; note = 2'-O-methylguanosine-3'-phosphate
  modified_base 9: mod_base = OTHER; note = 2'-deoxy-2'-fluoroadenosine-3'-phosphate
  modified_base 10: mod_base = OTHER; note = 2'-deoxy-2'-fluoroadenosine-3'-phosphate
  modified_base 11: mod_base = OTHER; note = 2'-deoxy-2'-fluorouridine-3'-phosphate
  modified_base 12: mod_base = OTHER; note = 2'-O-methyladenosine-3'-phosphate
  modified_base 13: mod_base = OTHER; note = 2'-O-methyluridine-3'-phosphate
  modified_base 14: mod_base = OTHER; note = 2'-O-methyluridine-3'-phosphate
  modified_base 15: mod_base = OTHER; note = 2'-O-methylcytidine-3'-phosphate
  modified_base 16: mod_base = OTHER; note = 2'-O-methyluridine-3'-phosphate
  modified_base 17: mod_base = OTHER; note = 2'-O-methyluridine-3'-phosphate
  modified_base 18: mod_base = OTHER; note = 2'-O-methylcytidine-3'-phosphate
  modified_base 19: mod_base = OTHER; note = 2'-O-methyladenosine-3'-phosphate
  modified_base 20: mod_base = OTHER; note = 2'-O-methyladenosine-3'-phosphate
  modified_base 21: mod_base = OTHER; note = 2'-O-methyladenosine-3'-phosphate
caaacttgaatattcttcaaa

SEQ ID NO: 253 - RNA, 23 nt, synthetic construct
  source 1..23: mol_type = other RNA
  modified_base 1: mod_base = OTHER; note = 2'-O-methyluridine-3'-phosphorothioate
  modified_base 2: mod_base = OTHER; note = 2'-deoxy-2'-fluorouridine-3'-phosphorothioate
  modified_base 3: mod_base = OTHER; note = 2'-O-methyluridine-3'-phosphate
  modified_base 4: mod_base = OTHER; note = 2'-O-methylguanosine-3'-phosphate
  modified_base 5: mod_base = OTHER; note = 2'-O-methyladenosine-3'-phosphate
  modified_base 6: mod_base = OTHER; note = 2'-deoxy-2'-fluoroadenosine-3'-phosphate
  modified_base 7: mod_base = OTHER; note = 2'-O-methylguanosine-3'-phosphate
  modified_base 8: mod_base = OTHER; note = 2'-deoxy-2'-fluoroadenosine-3'-phosphate
  modified_base 9: mod_base = OTHER; note = 2'-deoxy-2'-fluoroadenosine-3'-phosphate
  modified_base 10: mod_base = OTHER; note = 2'-O-methyluridine-3'-phosphate
  modified_base 11: mod_base = OTHER; note = 2'-O-methyladenosine-3'-phosphate
  modified_base 12: mod_base = OTHER; note = 2'-O-methyluridine-3'-phosphate
  modified_base 13: mod_base = OTHER; note = 2'-O-methyluridine-3'-phosphate
  modified_base 14: mod_base = OTHER; note = 2'-deoxy-2'-fluorocytidine-3'-phosphate
  modified_base 15: mod_base = OTHER; note = 2'-O-methyladenosine-3'-phosphate
  modified_base 16: mod_base = OTHER; note = 2'-deoxy-2'-fluoroadenosine-3'-phosphate
  modified_base 17: mod_base = OTHER; note = 2'-O-methylguanosine-3'-phosphate
  modified_base 18: mod_base = OTHER; note = 2'-O-methyluridine-3'-phosphate
  modified_base 19: mod_base = OTHER; note = 2'-O-methyluridine-3'-phosphate
  modified_base 20: mod_base = OTHER; note = 2'-O-methyluridine-3'-phosphate
  modified_base 21: mod_base = OTHER; note = 2'-O-methylguanosine-3'-phosphorothioate
  modified_base 22: mod_base = OTHER; note = 2'-O-methyladenosine-3'-phosphorothioate
  modified_base 23: mod_base = OTHER; note = 2'-O-methyladenosine
tttgaagaatattcaagtttgaa

SEQ ID NO: 254 - RNA, 21 nt, synthetic construct
  source 1..21: mol_type = other RNA
  modified_base 1: mod_base = OTHER; note = 2'-O-methyladenosine-3'-phosphorothioate
  modified_base 2: mod_base = OTHER; note = 2'-O-methyladenosine-3'-phosphorothioate
  modified_base 3: mod_base = OTHER; note = 2'-O-methyladenosine-3'-phosphate
  modified_base 4: mod_base = OTHER; note = 2'-O-methylcytidine-3'-phosphate
  modified_base 5: mod_base = OTHER; note = 2'-O-methyluridine-3'-phosphate
  modified_base 6: mod_base = OTHER; note = 2'-O-methyluridine-3'-phosphate
  modified_base 7: mod_base = OTHER; note = 2'-deoxy-2'-fluoroguanosine-3'-phosphate
  modified_base 8: mod_base = OTHER; note = 2'-O-methyladenosine-3'-phosphate
  modified_base 9: mod_base = OTHER; note = 2'-deoxy-2'-fluoroadenosine-3'-phosphate
  modified_base 10: mod_base = OTHER; note = 2'-deoxy-2'-fluorouridine-3'-phosphate
  modified_base 11: mod_base = OTHER; note = 2'-deoxy-2'-fluoroadenosine-3'-phosphate
  modified_base 12: mod_base = OTHER; note = 2'-O-methyluridine-3'-phosphate
  modified_base 13: mod_base = OTHER; note = 2'-O-methyluridine-3'-phosphate
  modified_base 14: mod_base = OTHER; note = 2'-O-methylcytidine-3'-phosphate
  modified_base 15: mod_base = OTHER; note = 2'-O-methyluridine-3'-phosphate
  modified_base 16: mod_base = OTHER; note = 2'-O-methyluridine-3'-phosphate
  modified_base 17: mod_base = OTHER; note = 2'-O-methylcytidine-3'-phosphate
  modified_base 18: mod_base = OTHER; note = 2'-O-methyladenosine-3'-phosphate
  modified_base 19: mod_base = OTHER; note = 2'-O-methyladenosine-3'-phosphate
  modified_base 20: mod_base = OTHER; note = 2'-O-methyladenosine-3'-phosphate
  modified_base 21: mod_base = OTHER; note = 2'-O-methyladenosine-3'-phosphate
aaacttgaatattcttcaaaa

SEQ ID NO: 255 - RNA, 23 nt, synthetic construct
  source 1..23: mol_type = other RNA
  modified_base 1: mod_base = OTHER; note = 2'-O-methyluridine-3'-phosphorothioate
  modified_base 2: mod_base = OTHER; note = 2'-deoxy-2'-fluorouridine-3'-phosphorothioate
  modified_base 3: mod_base = OTHER; note = 2'-O-methyluridine-3'-phosphate
  modified_base 4: mod_base = OTHER; note = 2'-O-methyluridine-3'-phosphate
  modified_base 5: mod_base = OTHER; note = 2'-O-methylguanosine-3'-phosphate
  modified_base 6: mod_base = OTHER; note = 2'-deoxy-2'-fluoroadenosine-3'-phosphate
  modified_base 7: mod_base = OTHER; note = 2'-O-methyladenosine-3'-phosphate
  modified_base 8: mod_base = OTHER; note = 2'-deoxy-2'-fluoroguanosine-3'-phosphate
  modified_base 9: mod_base = OTHER; note = 2'-deoxy-2'-fluoroadenosine-3'-phosphate
  modified_base 10: mod_base = OTHER; note = 2'-O-methyladenosine-3'-phosphate
  modified_base 11: mod_base = OTHER; note = 2'-O-methyluridine-3'-phosphate
  modified_base 12: mod_base = OTHER; note = 2'-O-methyladenosine-3'-phosphate
  modified_base 13: mod_base = OTHER; note = 2'-O-methyluridine-3'-phosphate
  modified_base 14: mod_base = OTHER; note = 2'-deoxy-2'-fluorouridine-3'-phosphate
  modified_base 15: mod_base = OTHER; note = 2'-O-methylcytidine-3'-phosphate
  modified_base 16: mod_base = OTHER; note = 2'-deoxy-2'-fluoroadenosine-3'-phosphate
  modified_base 17: mod_base = OTHER; note = 2'-O-methyladenosine-3'-phosphate
  modified_base 18: mod_base = OTHER; note = 2'-O-methylguanosine-3'-phosphate
  modified_base 19: mod_base = OTHER; note = 2'-O-methyluridine-3'-phosphate
  modified_base 20: mod_base = OTHER; note = 2'-O-methyluridine-3'-phosphate
  modified_base 21: mod_base = OTHER; note = 2'-O-methyluridine-3'-phosphorothioate
  modified_base 22: mod_base = OTHER; note = 2'-O-methylguanosine-3'-phosphorothioate
  modified_base 23: mod_base = OTHER; note = 2'-O-methyladenosine
ttttgaagaatattcaagtttga

SEQ ID NO: 256 - RNA, 21 nt, synthetic construct
  source 1..21: mol_type = other RNA
  modified_base 1: mod_base = OTHER; note = 2'-O-methylcytidine-3'-phosphorothioate
  modified_base 2: mod_base = OTHER; note = 2'-O-methyluridine-3'-phosphorothioate
  modified_base 3: mod_base = OTHER; note = 2'-O-methyluridine-3'-phosphate
  modified_base 4: mod_base = OTHER; note = 2'-O-methylguanosine-3'-phosphate
  modified_base 5: mod_base = OTHER; note = 2'-O-methyladenosine-3'-phosphate
  modified_base 6: mod_base = OTHER; note = 2'-O-methyladenosine-3'-phosphate
  modified_base 7: mod_base = OTHER; note = 2'-deoxy-2'-fluorouridine-3'-phosphate
  modified_base 8: mod_base = OTHER; note = 2'-O-methyladenosine-3'-phosphate
  modified_base 9: mod_base = OTHER; note = 2'-deoxy-2'-fluorouridine-3'-phosphate
  modified_base 10: mod_base = OTHER; note = 2'-deoxy-2'-fluorouridine-3'-phosphate
  modified_base 11: mod_base = OTHER; note = 2'-deoxy-2'-fluorocytidine-3'-phosphate
  modified_base 12: mod_base = OTHER; note = 2'-O-methyluridine-3'-phosphate
  modified_base 13: mod_base = OTHER; note = 2'-O-methyluridine-3'-phosphate
  modified_base 14: mod_base = OTHER; note = 2'-O-methylcytidine-3'-phosphate
  modified_base 15: mod_base = OTHER; note = 2'-O-methyladenosine-3'-phosphate
  modified_base 16: mod_base = OTHER; note = 2'-O-methyladenosine-3'-phosphate
  modified_base 17: mod_base = OTHER; note = 2'-O-methyladenosine-3'-phosphate
  modified_base 18: mod_base = OTHER; note = 2'-O-methylguanosine-3'-phosphate
  modified_base 19: mod_base = OTHER; note = 2'-O-methyladenosine-3'-phosphate
  modified_base 20: mod_base = OTHER; note = 2'-O-methylguanosine-3'-phosphate
  modified_base 21: mod_base = OTHER; note = 2'-O-methyladenosine-3'-phosphate
cttgaatattcttcaaagaga

SEQ ID NO: 257 - RNA, 23 nt, synthetic construct
  source 1..23: mol_type = other RNA
  modified_base 1: mod_base = OTHER; note = 2'-O-methyluridine-3'-phosphorothioate
  modified_base 2: mod_base = OTHER; note = 2'-deoxy-2'-fluorocytidine-3'-phosphorothioate
  modified_base 3: mod_base = OTHER; note = 2'-O-methyluridine-3'-phosphate
  modified_base 4: mod_base = OTHER; note = 2'-O-methylcytidine-3'-phosphate
  modified_base 5: mod_base = OTHER; note = 2'-O-methyluridine-3'-phosphate
  modified_base 6: mod_base = OTHER; note = 2'-deoxy-2'-fluorouridine-3'-phosphate
  modified_base 7: mod_base = OTHER; note = 2'-O-methyluridine-3'-phosphate
  modified_base 8: mod_base = OTHER; note = 2'-deoxy-2'-fluoroguanosine-3'-phosphate
  modified_base 9: mod_base = OTHER; note = 2'-deoxy-2'-fluoroadenosine-3'-phosphate
  modified_base 10: mod_base = OTHER; note = 2'-O-methyladenosine-3'-phosphate
  modified_base 11: mod_base = OTHER; note = 2'-O-methylguanosine-3'-phosphate
  modified_base 12: mod_base = OTHER; note = 2'-O-methyladenosine-3'-phosphate
  modified_base 13: mod_base = OTHER; note = 2'-O-methyladenosine-3'-phosphate
  modified_base 14: mod_base = OTHER; note = 2'-deoxy-2'-fluorouridine-3'-phosphate
  modified_base 15: mod_base = OTHER; note = 2'-O-methyladenosine-3'-phosphate
  modified_base 16: mod_base = OTHER; note = 2'-deoxy-2'-fluorouridine-3'-phosphate
  modified_base 17: mod_base = OTHER; note = 2'-O-methyluridine-3'-phosphate
  modified_base 18: mod_base = OTHER; note = 2'-O-methylcytidine-3'-phosphate
  modified_base 19: mod_base = OTHER; note = 2'-O-methyladenosine-3'-phosphate
  modified_base 20: mod_base = OTHER; note = 2'-O-methyladenosine-3'-phosphate
  modified_base 21: mod_base = OTHER; note = 2'-O-methylguanosine-3'-phosphorothioate
  modified_base 22: mod_base = OTHER; note = 2'-O-methyluridine-3'-phosphorothioate
  modified_base 23: mod_base = OTHER; note = 2'-O-methyluridine
tctctttgaagaatattcaagtt

SEQ ID NO: 258 - RNA, 21 nt, synthetic construct
  source 1..21: mol_type = other RNA
  modified_base 1: mod_base = OTHER; note = 2'-O-methyladenosine-3'-phosphorothioate
  modified_base 2: mod_base = OTHER; note = 2'-O-methylcytidine-3'-phosphorothioate
  modified_base 3: mod_base = OTHER; note = 2'-O-methyluridine-3'-phosphate
  modified_base 4: mod_base = OTHER; note = 2'-O-methylcytidine-3'-phosphate
  modified_base 5: mod_base = OTHER; note = 2'-O-methyluridine-3'-phosphate
  modified_base 6: mod_base = OTHER; note = 2'-O-methyladenosine-3'-phosphate
  modified_base 7: mod_base = OTHER; note = 2'-deoxy-2'-fluoroadenosine-3'-phosphate
  modified_base 8: mod_base = OTHER; note = 2'-O-methyluridine-3'-phosphate
  modified_base 9: mod_base = OTHER; note = 2'-deoxy-2'-fluorocytidine-3'-phosphate
  modified_base 10: mod_base = OTHER; note = 2'-deoxy-2'-fluoroadenosine-3'-phosphate
  modified_base 11: mod_base = OTHER; note = 2'-deoxy-2'-fluoroguanosine-3'-phosphate
  modified_base 12: mod_base = OTHER; note = 2'-O-methyladenosine-3'-phosphate
  modified_base 13: mod_base = OTHER; note = 2'-O-methylguanosine-3'-phosphate
  modified_base 14: mod_base = OTHER; note = 2'-O-methylguanosine-3'-phosphate
  modified_base 15: mod_base = OTHER; note = 2'-O-methyladenosine-3'-phosphate
  modified_base 16: mod_base = OTHER; note = 2'-O-methyladenosine-3'-phosphate
  modified_base 17: mod_base = OTHER; note = 2'-O-methylguanosine-3'-phosphate
  modified_base 18: mod_base = OTHER; note = 2'-O-methyladenosine-3'-phosphate
  modified_base 19: mod_base = OTHER; note = 2'-O-methyladenosine-3'-phosphate
  modified_base 20: mod_base = OTHER; note = 2'-O-methyladenosine-3'-phosphate
  modified_base 21: mod_base = OTHER; note = 2'-O-methyladenosine-3'-phosphate
actctaatcagaggaagaaaa

SEQ ID NO: 259 - RNA, 23 nt, synthetic construct
  source 1..23: mol_type = other RNA
  modified_base 1: mod_base = OTHER; note = 2'-O-methyluridine-3'-phosphorothioate
  modified_base 2: mod_base = OTHER; note = 2'-deoxy-2'-fluorouridine-3'-phosphorothioate
  modified_base 3: mod_base = OTHER; note = 2'-O-methyluridine-3'-phosphate
  modified_base 4: mod_base = OTHER; note = 2'-O-methyluridine-3'-phosphate
  modified_base 5: mod_base = OTHER; note = 2'-O-methylcytidine-3'-phosphate
  modified_base 6: mod_base = OTHER; note = 2'-deoxy-2'-fluorouridine-3'-phosphate
  modified_base 7: mod_base = OTHER; note = 2'-O-methyluridine-3'-phosphate
  modified_base 8: mod_base = OTHER; note = 2'-deoxy-2'-fluorocytidine-3'-phosphate
  modified_base 9: mod_base = OTHER; note = 2'-deoxy-2'-fluorocytidine-3'-phosphate
  modified_base 10: mod_base = OTHER; note = 2'-O-methyluridine-3'-phosphate
  modified_base 11: mod_base = OTHER; note = 2'-O-methylcytidine-3'-phosphate
  modified_base 12: mod_base = OTHER; note = 2'-O-methyluridine-3'-phosphate
  modified_base 13: mod_base = OTHER; note = 2'-O-methylguanosine-3'-phosphate
  modified_base 14: mod_base = OTHER; note = 2'-deoxy-2'-fluoroadenosine-3'-phosphate
  modified_base 15: mod_base = OTHER; note = 2'-O-methyluridine-3'-phosphate
  modified_base 16: mod_base = OTHER; note = 2'-deoxy-2'-fluorouridine-3'-phosphate
  modified_base 17: mod_base = OTHER; note = 2'-O-methyladenosine-3'-phosphate
  modified_base 18: mod_base = OTHER; note = 2'-O-methylguanosine-3'-phosphate
  modified_base 19: mod_base = OTHER; note = 2'-O-methyladenosine-3'-phosphate
  modified_base 20: mod_base = OTHER; note = 2'-O-methylguanosine-3'-phosphate
  modified_base 21: mod_base = OTHER; note = 2'-O-methyluridine-3'-phosphorothioate
  modified_base 22: mod_base = OTHER; note = 2'-O-methyluridine-3'-phosphorothioate
  modified_base 23: mod_base = OTHER; note = 2'-O-methylguanosine
ttttcttcctctgattagagttg

SEQ ID NO: 260 - RNA, 21 nt, synthetic construct
  source 1..21: mol_type = other RNA
  modified_base 1: mod_base = OTHER; note = 2'-O-methylguanosine-3'-phosphorothioate
  modified_base 2: mod_base = OTHER; note = 2'-O-methyladenosine-3'-phosphorothioate
  modified_base 3: mod_base = OTHER; note = 2'-O-methyladenosine-3'-phosphate
  modified_base 4: mod_base = OTHER; note = 2'-O-methylguanosine-3'-phosphate
  modified_base 5: mod_base = OTHER; note = 2'-O-methyluridine-3'-phosphate
  modified_base 6: mod_base = OTHER; note = 2'-O-methyladenosine-3'-phosphate
  modified_base 7: mod_base = OTHER; note = 2'-deoxy-2'-fluoroadenosine-3'-phosphate
  modified_base 8: mod_base = OTHER; note = 2'-O-methyladenosine-3'-phosphate
  modified_base 9: mod_base = OTHER; note = 2'-deoxy-2'-fluoroadenosine-3'-phosphate
  modified_base 10: mod_base = OTHER; note = 2'-deoxy-2'-fluorocytidine-3'-phosphate
  modified_base 11: mod_base = OTHER; note = 2'-deoxy-2'-fluorocytidine-3'-phosphate
  modified_base 12: mod_base = OTHER; note = 2'-O-methyladenosine-3'-phosphate
  modified_base 13: mod_base = OTHER; note = 2'-O-methylguanosine-3'-phosphate
  modified_base 14: mod_base = OTHER; note = 2'-O-methyladenosine-3'-phosphate
  modified_base 15: mod_base = OTHER; note = 2'-O-methyluridine-3'-phosphate
  modified_base 16: mod_base = OTHER; note = 2'-O-methylguanosine-3'-phosphate
  modified_base 17: mod_base = OTHER; note = 2'-O-methyluridine-3'-phosphate
  modified_base 18: mod_base = OTHER; note = 2'-O-methyluridine-3'-phosphate
  modified_base 19: mod_base = OTHER; note = 2'-O-methyluridine-3'-phosphate
  modified_base 20: mod_base = OTHER; note = 2'-O-methyluridine-3'-phosphate
  modified_base 21: mod_base = OTHER; note = 2'-O-methyladenosine-3'-phosphate
gaagtaaaaccagatgtttta

SEQ ID NO: 261 - RNA, 23 nt, synthetic construct
  source 1..23: mol_type = other RNA
  modified_base 1: mod_base = OTHER; note = 2'-O-methyluridine-3'-phosphorothioate
  modified_base 2: mod_base = OTHER; note = 2'-deoxy-2'-fluoroadenosine-3'-phosphorothioate
  modified_base 3: mod_base = OTHER; note = 2'-O-methyladenosine-3'-phosphate
  modified_base 4: mod_base = OTHER; note = 2'-O-methyladenosine-3'-phosphate
  modified_base 5: mod_base = OTHER; note = 2'-O-methyladenosine-3'-phosphate
  modified_base 6: mod_base = OTHER; note = 2'-deoxy-2'-fluorocytidine-3'-phosphate
  modified_base 7: mod_base = OTHER; note = 2'-O-methyladenosine-3'-phosphate
  modified_base 8: mod_base = OTHER; note = 2'-deoxy-2'-fluorouridine-3'-phosphate
  modified_base 9: mod_base = OTHER; note = 2'-deoxy-2'-fluorocytidine-3'-phosphate
  modified_base 10: mod_base = OTHER; note = 2'-O-methyluridine-3'-phosphate
  modified_base 11: mod_base = OTHER; note = 2'-O-methylguanosine-3'-phosphate
  modified_base 12: mod_base = OTHER; note = 2'-O-methylguanosine-3'-phosphate
  modified_base 13: mod_base = OTHER; note = 2'-O-methyluridine-3'-phosphate
  modified_base 14: mod_base = OTHER; note = 2'-deoxy-2'-fluorouridine-3'-phosphate
  modified_base 15: mod_base = OTHER; note = 2'-O-methyluridine-3'-phosphate
  modified_base 16: mod_base = OTHER; note = 2'-deoxy-2'-fluorouridine-3'-phosphate
  modified_base 17: mod_base = OTHER; note = 2'-O-methyladenosine-3'-phosphate
  modified_base 18: mod_base = OTHER; note = 2'-O-methylcytidine-3'-phosphate
  modified_base 19: mod_base = OTHER; note = 2'-O-methyluridine-3'-phosphate
  modified_base 20: mod_base = OTHER; note = 2'-O-methyluridine-3'-phosphate
  modified_base 21: mod_base = OTHER; note = 2'-O-methylcytidine-3'-phosphorothioate
  modified_base 22: mod_base = OTHER; note = 2'-O-methylcytidine-3'-phosphorothioate
  modified_base 23: mod_base = OTHER; note = 2'-O-methyluridine
taaaacatctggttttacttcct

SEQ ID NO: 262 - RNA, 21 nt, synthetic construct
  source 1..21: mol_type = other RNA
  modified_base 1: mod_base = OTHER; note = 2'-O-methylguanosine-3'-phosphorothioate
  modified_base 2: mod_base = OTHER; note = 2'-O-methyluridine-3'-phosphorothioate
  modified_base 3: mod_base = OTHER; note = 2'-O-methyladenosine-3'-phosphate
  modified_base 4: mod_base = OTHER; note = 2'-O-methyladenosine-3'-phosphate
  modified_base 5: mod_base = OTHER; note = 2'-O-methyladenosine-3'-phosphate
  modified_base 6: mod_base = OTHER; note = 2'-O-methyladenosine-3'-phosphate
  modified_base 7: mod_base = OTHER; note = 2'-deoxy-2'-fluorocytidine-3'-phosphate
  modified_base 8: mod_base = OTHER; note = 2'-O-methylcytidine-3'-phosphate
  modified_base 9: mod_base = OTHER; note = 2'-deoxy-2'-fluoroadenosine-3'-phosphate
  modified_base 10: mod_base = OTHER; note = 2'-deoxy-2'-fluoroguanosine-3'-phosphate
  modified_base 11: mod_base = OTHER; note = 2'-deoxy-2'-fluoroadenosine-3'-phosphate
  modified_base 12: mod_base = OTHER; note = 2'-O-methyluridine-3'-phosphate
  modified_base 13: mod_base = OTHER; note = 2'-O-methylguanosine-3'-phosphate
  modified_base 14: mod_base = OTHER; note = 2'-O-methyluridine-3'-phosphate
  modified_base 15: mod_base = OTHER; note = 2'-O-methyluridine-3'-phosphate
  modified_base 16: mod_base = OTHER; note = 2'-O-methyluridine-3'-phosphate
  modified_base 17: mod_base = OTHER; note = 2'-O-methyluridine-3'-phosphate
  modified_base 18: mod_base = OTHER; note = 2'-O-methylcytidine-3'-phosphate
  modified_base 19: mod_base = OTHER; note = 2'-O-methylcytidine-3'-phosphate
  modified_base 20: mod_base = OTHER; note = 2'-O-methyladenosine-3'-phosphate
  modified_base 21: mod_base = OTHER; note = 2'-O-methyladenosine-3'-phosphate
gtaaaaccagatgttttccaa

SEQ ID NO: 263 - RNA, 23 nt, synthetic construct
  source 1..23: mol_type = other RNA
  modified_base 1: mod_base = OTHER; note = 2'-O-methyluridine-3'-phosphorothioate
  modified_base 2: mod_base = OTHER; note = 2'-deoxy-2'-fluorouridine-3'-phosphorothioate
  modified_base 3: mod_base = OTHER; note = 2'-O-methylguanosine-3'-phosphate
  modified_base 4: mod_base = OTHER; note = 2'-O-methylguanosine-3'-phosphate
  modified_base 5: mod_base = OTHER; note = 2'-O-methyladenosine-3'-phosphate
  modified_base 6: mod_base = OTHER; note = 2'-deoxy-2'-fluoroadenosine-3'-phosphate
  modified_base 7: mod_base = OTHER; note = 2'-O-methyladenosine-3'-phosphate
  modified_base 8: mod_base = OTHER; note = 2'-deoxy-2'-fluoroadenosine-3'-phosphate
  modified_base 9: mod_base = OTHER; note = 2'-deoxy-2'-fluorocytidine-3'-phosphate
  modified_base 10: mod_base = OTHER; note = 2'-O-methyladenosine-3'-phosphate
  modified_base 11: mod_base = OTHER; note = 2'-O-methyluridine-3'-phosphate
  modified_base 12: mod_base = OTHER; note = 2'-O-methylcytidine-3'-phosphate
  modified_base 13: mod_base = OTHER; note = 2'-O-methyluridine-3'-phosphate
  modified_base 14: mod_base = OTHER; note = 2'-deoxy-2'-fluoroguanosine-3'-phosphate
  modified_base 15: mod_base = OTHER; note = 2'-O-methylguanosine-3'-phosphate
  modified_base 16: mod_base = OTHER; note = 2'-deoxy-2'-fluorouridine-3'-phosphate
  modified_base 17: mod_base = OTHER; note = 2'-O-methyluridine-3'-phosphate
  modified_base 18: mod_base = OTHER; note = 2'-O-methyluridine-3'-phosphate
  modified_base 19: mod_base = OTHER; note = 2'-O-methyluridine-3'-phosphate
  modified_base 20: mod_base = OTHER; note = 2'-O-methyladenosine-3'-phosphate
  modified_base 21: mod_base = OTHER; note = 2'-O-methylcytidine-3'-phosphorothioate
  modified_base 22: mod_base = OTHER; note = 2'-O-methyluridine-3'-phosphorothioate
  modified_base 23: mod_base = OTHER; note = 2'-O-methyluridine
ttggaaaacatctggttttactt

SEQ ID NO: 264 - RNA, 21 nt, synthetic construct
  source 1..21: mol_type = other RNA
  modified_base 1: mod_base = OTHER; note = 2'-O-methyladenosine-3'-phosphorothioate
  modified_base 2: mod_base = OTHER; note = 2'-O-methyladenosine-3'-phosphorothioate
  modified_base 3: mod_base = OTHER; note = 2'-O-methyladenosine-3'-phosphate
  modified_base 4: mod_base = OTHER; note = 2'-O-methyladenosine-3'-phosphate
  modified_base 5: mod_base = OTHER; note = 2'-O-methylcytidine-3'-phosphate
  modified_base 6: mod_base = OTHER; note = 2'-O-methylcytidine-3'-phosphate
  modified_base 7: mod_base = OTHER; note = 2'-deoxy-2'-fluoroadenosine-3'-phosphate
  modified_base 8: mod_base = OTHER; note = 2'-O-methylguanosine-3'-phosphate
  modified_base 9: mod_base = OTHER; note = 2'-deoxy-2'-fluoroadenosine-3'-phosphate
  modified_base 10: mod_base = OTHER; note = 2'-deoxy-2'-fluorouridine-3'-phosphate
  modified_base 11: mod_base = OTHER; note = 2'-deoxy-2'-fluoroguanosine-3'-phosphate
  modified_base 12: mod_base = OTHER; note = 2'-O-methyluridine-3'-phosphate
  modified_base 13: mod_base = OTHER; note = 2'-O-methyluridine-3'-phosphate
  modified_base 14: mod_base = OTHER; note = 2'-O-methyluridine-3'-phosphate
  modified_base 15: mod_base = OTHER; note = 2'-O-methyluridine-3'-phosphate
  modified_base 16: mod_base = OTHER; note = 2'-O-methylcytidine-3'-phosphate
  modified_base 17: mod_base = OTHER; note = 2'-O-methylcytidine-3'-phosphate
  modified_base 18: mod_base = OTHER; note = 2'-O-methyladenosine-3'-phosphate
  modified_base 19: mod_base = OTHER; note = 2'-O-methylcytidine-3'-phosphate
  modified_base 20: mod_base = OTHER; note = 2'-O-methylcytidine-3'-phosphate
  modified_base 21: mod_base = OTHER; note = 2'-O-methyladenosine-3'-phosphate
aaaaccagatgttttccacca

SEQ ID NO: 265 - RNA, 23 nt, synthetic construct
  source 1..23: mol_type = other RNA
  modified_base 1: mod_base = OTHER; note = 2'-O-methyluridine-3'-phosphorothioate
  modified_base 2: mod_base = OTHER; note = 2'-deoxy-2'-fluoroguanosine-3'-phosphorothioate
  modified_base 3: mod_base = OTHER; note = 2'-O-methylguanosine-3'-phosphate
  modified_base 4: mod_base = OTHER; note = 2'-O-methyluridine-3'-phosphate
  modified_base 5: mod_base = OTHER; note = 2'-O-methylguanosine-3'-phosphate
  modified_base 6: mod_base = OTHER; note = 2'-deoxy-2'-fluoroguanosine-3'-phosphate
  modified_base 7: mod_base = OTHER; note = 2'-O-methyladenosine-3'-phosphate
  modified_base 8: mod_base = OTHER; note = 2'-deoxy-2'-fluoroadenosine-3'-phosphate
  modified_base 9: mod_base = OTHER; note = 2'-deoxy-2'-fluoroadenosine-3'-phosphate
  modified_base 10: mod_base = OTHER; note = 2'-O-methyladenosine-3'-phosphate
  modified_base 11: mod_base = OTHER; note = 2'-O-methylcytidine-3'-phosphate
  modified_base 12: mod_base = OTHER; note = 2'-O-methyladenosine-3'-phosphate
  modified_base 13: mod_base = OTHER; note = 2'-O-methyluridine-3'-phosphate
  modified_base 14: mod_base = OTHER; note = 2'-deoxy-2'-fluorocytidine-3'-phosphate
  modified_base 15: mod_base = OTHER; note = 2'-O-methyluridine-3'-phosphate
  modified_base 16: mod_base = OTHER; note = 2'-deoxy-2'-fluoroguanosine-3'-phosphate
  modified_base 17: mod_base = OTHER; note = 2'-O-methylguanosine-3'-phosphate
  modified_base 18: mod_base = OTHER; note = 2'-O-methyluridine-3'-phosphate
  modified_base 19: mod_base = OTHER; note = 2'-O-methyluridine-3'-phosphate
  modified_base 20: mod_base = OTHER; note = 2'-O-methyluridine-3'-phosphate
  modified_base 21: mod_base = OTHER; note = 2'-O-methyluridine-3'-phosphorothioate
  modified_base 22: mod_base = OTHER; note = 2'-O-methyladenosine-3'-phosphorothioate
  modified_base 23: mod_base = OTHER; note = 2'-O-methylcytidine
tggtggaaaacatctggttttac

SEQ ID NO: 266 - RNA, 21 nt, synthetic construct
  source 1..21: mol_type = other RNA
  modified_base 1: mod_base = OTHER; note = 2'-O-methyladenosine-3'-phosphorothioate
  modified_base 2: mod_base = OTHER; note = 2'-O-methyladenosine-3'-phosphorothioate
  modified_base 3: mod_base = OTHER; note = 2'-O-methyladenosine-3'-phosphate
  modified_base 4: mod_base = OTHER; note = 2'-O-methylcytidine-3'-phosphate
  modified_base 5: mod_base = OTHER; note = 2'-O-methylcytidine-3'-phosphate
  modified_base 6: mod_base = OTHER; note = 2'-O-methyladenosine-3'-phosphate
  modified_base 7: mod_base = OTHER; note = 2'-deoxy-2'-fluoroguanosine-3'-phosphate
  modified_base 8: mod_base = OTHER; note = 2'-O-methyladenosine-3'-phosphate
  modified_base 9: mod_base = OTHER; note = 2'-deoxy-2'-fluorouridine-3'-phosphate
  modified_base 10: mod_base = OTHER; note = 2'-deoxy-2'-fluoroguanosine-3'-phosphate
  modified_base 11: mod_base = OTHER; note = 2'-deoxy-2'-fluorouridine-3'-phosphate
  modified_base 12: mod_base = OTHER; note = 2'-O-methyluridine-3'-phosphate
  modified_base 13: mod_base = OTHER; note = 2'-O-methyluridine-3'-phosphate
  modified_base 14: mod_base = OTHER; note = 2'-O-methyluridine-3'-phosphate
  modified_base 15: mod_base = OTHER; note = 2'-O-methylcytidine-3'-phosphate
  modified_base 16: mod_base = OTHER; note = 2'-O-methylcytidine-3'-phosphate
  modified_base 17: mod_base = OTHER; note = 2'-O-methyladenosine-3'-phosphate
  modified_base 18: mod_base = OTHER; note = 2'-O-methylcytidine-3'-phosphate
  modified_base 19: mod_base = OTHER; note = 2'-O-methylcytidine-3'-phosphate
  modified_base 20: mod_base = OTHER; note = 2'-O-methyladenosine-3'-phosphate
  modified_base 21: mod_base = OTHER; note = 2'-O-methyladenosine-3'-phosphate
aaaccagatgttttccaccaa

SEQ ID NO: 267 - RNA, 23 nt, synthetic construct
  source 1..23: mol_type = other RNA
  modified_base 1: mod_base = OTHER; note = 2'-O-methyluridine-3'-phosphorothioate
  modified_base 2: mod_base = OTHER; note = 2'-deoxy-2'-fluorouridine-3'-phosphorothioate
  modified_base 3: mod_base = OTHER; note = 2'-O-methylguanosine-3'-phosphate
  modified_base 4: mod_base = OTHER; note = 2'-O-methylguanosine-3'-phosphate
  modified_base 5: mod_base = OTHER; note = 2'-O-methyluridine-3'-phosphate
  modified_base 6: mod_base = OTHER; note = 2'-deoxy-2'-fluoroguanosine-3'-phosphate
  modified_base 7: mod_base = OTHER; note = 2'-O-methylguanosine-3'-phosphate
  modified_base 8: mod_base = OTHER; note = 2'-deoxy-2'-fluoroadenosine-3'-phosphate
  modified_base 9: mod_base = OTHER; note = 2'-deoxy-2'-fluoroadenosine-3'-phosphate
  modified_base 10: mod_base = OTHER; note = 2'-O-methyladenosine-3'-phosphate
  modified_base 11: mod_base = OTHER; note = 2'-O-methyladenosine-3'-phosphate
  modified_base 12: mod_base = OTHER; note = 2'-O-methylcytidine-3'-phosphate
  modified_base 13: mod_base = OTHER; note = 2'-O-methyladenosine-3'-phosphate
  modified_base 14: mod_base = OTHER; note = 2'-deoxy-2'-fluorouridine-3'-phosphate
  modified_base 15: mod_base = OTHER; note = 2'-O-methylcytidine-3'-phosphate
  modified_base 16: mod_base = OTHER; note = 2'-deoxy-2'-fluorouridine-3'-phosphate
  modified_base 17: mod_base = OTHER; note = 2'-O-methylguanosine-3'-phosphate
  modified_base 18: mod_base = OTHER; note = 2'-O-methylguanosine-3'-phosphate
  modified_base 19: mod_base = OTHER; note = 2'-O-methyluridine-3'-phosphate
  modified_base 20: mod_base = OTHER; note = 2'-O-methyluridine-3'-phosphate
  modified_base 21: mod_base = OTHER; note = 2'-O-methyluridine-3'-phosphorothioate
  modified_base 22: mod_base = OTHER; note = 2'-O-methyluridine-3'-phosphorothioate
  modified_base 23: mod_base = OTHER; note = 2'-O-methyladenosine
ttggtggaaaacatctggtttta

SEQ ID NO: 268 - RNA, 21 nt, synthetic construct
  source 1..21: mol_type = other RNA
  modified_base 1: mod_base = OTHER; note = 2'-O-methyladenosine-3'-phosphorothioate
  modified_base 2: mod_base = OTHER; note = 2'-O-methyladenosine-3'-phosphorothioate
  modified_base 3: mod_base = OTHER; note = 2'-O-methylcytidine-3'-phosphate
  modified_base 4: mod_base = OTHER; note = 2'-O-methylcytidine-3'-phosphate
  modified_base 5: mod_base = OTHER; note = 2'-O-methyladenosine-3'-phosphate
  modified_base 6: mod_base = OTHER; note = 2'-O-methylguanosine-3'-phosphate
  modified_base 7: mod_base = OTHER; note = 2'-deoxy-2'-fluoroadenosine-3'-phosphate
  modified_base 8: mod_base = OTHER; note = 2'-O-methyluridine-3'-phosphate
  modified_base 9: mod_base = OTHER; note = 2'-deoxy-2'-fluoroguanosine-3'-phosphate
  modified_base 10: mod_base = OTHER; note = 2'-deoxy-2'-fluorouridine-3'-phosphate
  modified_base 11: mod_base = OTHER; note = 2'-deoxy-2'-fluorouridine-3'-phosphate
  modified_base 12: mod_base = OTHER; note = 2'-O-methyluridine-3'-phosphate
  modified_base 13: mod_base = OTHER; note = 2'-O-methyluridine-3'-phosphate
  modified_base 14: mod_base = OTHER; note = 2'-O-methylcytidine-3'-phosphate
  modified_base 15: mod_base = OTHER; note = 2'-O-methylcytidine-3'-phosphate
  modified_base 16: mod_base = OTHER; note = 2'-O-methyladenosine-3'-phosphate
  modified_base 17: mod_base = OTHER; note = 2'-O-methylcytidine-3'-phosphate
  modified_base 18: mod_base = OTHER; note = 2'-O-methylcytidine-3'-phosphate
  modified_base 19: mod_base = OTHER; note = 2'-O-methyladenosine-3'-phosphate
  modified_base 20: mod_base = OTHER; note = 2'-O-methyladenosine-3'-phosphate
  modified_base 21: mod_base = OTHER; note = 2'-O-methyladenosine-3'-phosphate
aaccagatgttttccaccaaa

SEQ ID NO: 269 - RNA, 23 nt, synthetic construct
  source 1..23: mol_type = other RNA
  modified_base 1: mod_base = OTHER; note = 2'-O-methyluridine-3'-phosphorothioate
  modified_base 2: mod_base = OTHER; note = 2'-deoxy-2'-fluorouridine-3'-phosphorothioate
  modified_base 3: mod_base = OTHER; note = 2'-O-methyluridine-3'-phosphate
  modified_base 4: mod_base = OTHER; note = 2'-O-methylguanosine-3'-phosphate
  modified_base 5: mod_base = OTHER; note = 2'-O-methylguanosine-3'-phosphate
  modified_base 6: mod_base = OTHER; note = 2'-deoxy-2'-fluorouridine-3'-phosphate
  modified_base 7: mod_base = OTHER; note = 2'-O-methylguanosine-3'-phosphate
  modified_base 8: mod_base = OTHER; note = 2'-deoxy-2'-fluoroguanosine-3'-phosphate
  modified_base 9: mod_base = OTHER; note = 2'-deoxy-2'-fluoroadenosine-3'-phosphate
  modified_base 10: mod_base = OTHER; note = 2'-O-methyladenosine-3'-phosphate
  modified_base 11: mod_base = OTHER; note = 2'-O-methyladenosine-3'-phosphate
  modified_base 12: mod_base = OTHER; note = 2'-O-methyladenosine-3'-phosphate
  modified_base 13: mod_base = OTHER; note = 2'-O-methylcytidine-3'-phosphate
  modified_base 14: mod_base = OTHER; note = 2'-deoxy-2'-fluoroadenosine-3'-phosphate
  modified_base 15: mod_base = OTHER; note = 2'-O-methyluridine-3'-phosphate
  modified_base 16: mod_base = OTHER; note = 2'-deoxy-2'-fluorocytidine-3'-phosphate
  modified_base 17: mod_base = OTHER; note = 2'-O-methyluridine-3'-phosphate
  modified_base 18: mod_base = OTHER; note = 2'-O-methylguanosine-3'-phosphate
  modified_base 19: mod_base = OTHER; note = 2'-O-methylguanosine-3'-phosphate
  modified_base 20: mod_base = OTHER; note = 2'-O-methyluridine-3'-phosphate
  modified_base 21: mod_base = OTHER; note = 2'-O-methyluridine-3'-phosphorothioate
  modified_base 22: mod_base = OTHER; note = 2'-O-methyluridine-3'-phosphorothioate
  modified_base 23: mod_base = OTHER; note = 2'-O-methyluridine
tttggtggaaaacatctggtttt

SEQ ID NO: 270 - RNA, 21 nt, synthetic construct
  source 1..21: mol_type = other RNA
  modified_base 1: mod_base = OTHER; note = 2'-O-methyluridine-3'-phosphorothioate
  modified_base 2: mod_base = OTHER; note = 2'-O-methyluridine-3'-phosphorothioate
  modified_base 3: mod_base = OTHER; note = 2'-O-methylguanosine-3'-phosphate
  modified_base 4: mod_base = OTHER; note = 2'-O-methyluridine-3'-phosphate
  modified_base 5: mod_base = OTHER; note = 2'-O-methylguanosine-3'-phosphate
  modified_base 6: mod_base = OTHER; note = 2'-O-methyluridine-3'-phosphate
  modified_base 7: mod_base = OTHER; note = 2'-deoxy-2'-fluorocytidine-3'-phosphate
  modified_base 8: mod_base = OTHER; note = 2'-O-methyladenosine-3'-phosphate
  modified_base 9: mod_base = OTHER; note = 2'-deoxy-2'-fluoroadenosine-3'-phosphate
  modified_base 10: mod_base = OTHER; note = 2'-deoxy-2'-fluoroadenosine-3'-phosphate
  modified_base 11: mod_base = OTHER; note = 2'-deoxy-2'-fluoroadenosine-3'-phosphate
  modified_base 12: mod_base = OTHER; note = 2'-O-methyluridine-3'-phosphate
  modified_base 13: mod_base = OTHER; note = 2'-O-methylguanosine-3'-phosphate
  modified_base 14: mod_base = OTHER; note = 2'-O-methyluridine-3'-phosphate
  modified_base 15: mod_base = OTHER; note = 2'-O-methyluridine-3'-phosphate
  modified_base 16: mod_base = OTHER; note = 2'-O-methylcytidine-3'-phosphate
  modified_base 17: mod_base = OTHER; note = 2'-O-methyluridine-3'-phosphate
  modified_base 18: mod_base = OTHER; note = 2'-O-methyladenosine-3'-phosphate
  modified_base 19: mod_base = OTHER; note = 2'-O-methylcytidine-3'-phosphate
  modified_base 20: mod_base = OTHER; note = 2'-O-methyladenosine-3'-phosphate
  modified_base 21: mod_base = OTHER; note = 2'-O-methyladenosine-3'-phosphate
ttgtgtcaaaatgttctacaa

SEQ ID NO: 271 - RNA, 23 nt, synthetic construct
  source 1..23: mol_type = other RNA
  modified_base 1: mod_base = OTHER; note = 2'-O-methyluridine-3'-phosphorothioate
  modified_base 2: mod_base = OTHER; note = 2'-deoxy-2'-fluorouridine-3'-phosphorothioate
  modified_base 3: mod_base = OTHER; note = 2'-O-methylguanosine-3'-phosphate
  modified_base 4: mod_base = OTHER; note = 2'-O-methyluridine-3'-phosphate
  modified_base 5: mod_base = OTHER; note = 2'-O-methyladenosine-3'-phosphate
  modified_base 6: mod_base = OTHER; note = 2'-deoxy-2'-fluoroguanosine-3'-phosphate
  modified_base 7: mod_base = OTHER; note = 2'-O-methyladenosine-3'-phosphate
  modified_base 8: mod_base = OTHER; note = 2'-deoxy-2'-fluoroadenosine-3'-phosphate
  modified_base 9: mod_base = OTHER; note = 2'-deoxy-2'-fluorocytidine-3'-phosphate
  modified_base 10: mod_base = OTHER; note = 2'-O-methyladenosine-3'-phosphate
  modified_base 11: mod_base = OTHER; note = 2'-O-methyluridine-3'-phosphate
  modified_base 12: mod_base = OTHER; note = 2'-O-methyluridine-3'-phosphate
  modified_base 13: mod_base = OTHER; note = 2'-O-methyluridine-3'-phosphate
  modified_base 14: mod_base = OTHER; note = 2'-deoxy-2'-fluorouridine-3'-phosphate
  modified_base 15: mod_base = OTHER; note = 2'-O-methylguanosine-3'-phosphate
  modified_base 16: mod_base = OTHER; note = 2'-deoxy-2'-fluoroadenosine-3'-phosphate
  modified_base 17: mod_base = OTHER; note = 2'-O-methylcytidine-3'-phosphate
  modified_base 18: mod_base = OTHER; note = 2'-O-methyladenosine-3'-phosphate
  modified_base 19: mod_base = OTHER; note = 2'-O-methylcytidine-3'-phosphate
  modified_base 20: mod_base = OTHER; note = 2'-O-methyladenosine-3'-phosphate
  modified_base 21: mod_base = OTHER; note = 2'-O-methyladenosine-3'-phosphorothioate
  modified_base 22: mod_base = OTHER; note = 2'-O-methyladenosine-3'-phosphorothioate
  modified_base 23: mod_base = OTHER; note = 2'-O-methyladenosine
ttgtagaacattttgacacaaaa

SEQ ID NO: 272 - RNA, 21 nt, synthetic construct
  source 1..21: mol_type = other RNA
  modified_base 1: mod_base = OTHER; note = 2'-O-methyluridine-3'-phosphorothioate
  modified_base 2: mod_base = OTHER; note = 2'-O-methylguanosine-3'-phosphorothioate
  modified_base 3: mod_base = OTHER; note = 2'-O-methyluridine-3'-phosphate
  modified_base 4: mod_base = OTHER; note = 2'-O-methylguanosine-3'-phosphate
  modified_base 5: mod_base = OTHER; note = 2'-O-methyluridine-3'-phosphate
  modified_base 6: mod_base = OTHER; note = 2'-O-methylcytidine-3'-phosphate
  modified_base 7: mod_base = OTHER; note = 2'-deoxy-2'-fluoroadenosine-3'-phosphate
  modified_base 8: mod_base = OTHER; note = 2'-O-methyladenosine-3'-phosphate
  modified_base 9: mod_base = OTHER; note = 2'-deoxy-2'-fluoroadenosine-3'-phosphate
  modified_base 10: mod_base = OTHER; note = 2'-deoxy-2'-fluoroadenosine-3'-phosphate
  modified_base 11: mod_base = OTHER; note = 2'-deoxy-2'-fluorouridine-3'-phosphate
  modified_base 12: mod_base = OTHER; note = 2'-O-methylguanosine-3'-phosphate
  modified_base 13: mod_base = OTHER; note = 2'-O-methyluridine-3'-phosphate
  modified_base 14: mod_base = OTHER; note = 2'-O-methyluridine-3'-phosphate
  modified_base 15: mod_base = OTHER; note = 2'-O-methylcytidine-3'-phosphate
  modified_base 16: mod_base = OTHER; note = 2'-O-methyluridine-3'-phosphate
  modified_base 17: mod_base = OTHER; note = 2'-O-methyladenosine-3'-phosphate
  modified_base 18: mod_base = OTHER; note = 2'-O-methylcytidine-3'-phosphate
  modified_base 19: mod_base = OTHER; note = 2'-O-methyladenosine-3'-phosphate
  modified_base 20: mod_base = OTHER; note = 2'-O-methyluridine-3'-phosphate
  modified_base 21: mod_base = OTHER; note = 2'-O-methyladenosine-3'-phosphate
tgtgtcaaaatgttctacata

SEQ ID NO: 273 - RNA, 23 nt, synthetic construct
  source 1..23: mol_type = other RNA
  modified_base 1: mod_base = OTHER; note = 2'-O-methyluridine-3'-phosphorothioate
  modified_base 2: mod_base = OTHER; note = 2'-deoxy-2'-fluoroadenosine-3'-phosphorothioate
  modified_base 3: mod_base = OTHER; note = 2'-O-methyluridine-3'-phosphate
  modified_base 4: mod_base = OTHER; note = 2'-O-methylguanosine-3'-phosphate
  modified_base 5: mod_base = OTHER; note = 2'-O-methyluridine-3'-phosphate
  modified_base 6: mod_base = OTHER; note = 2'-deoxy-2'-fluoroadenosine-3'-phosphate
  modified_base 7: mod_base = OTHER; note = 2'-O-methylguanosine-3'-phosphate
  modified_base 8: mod_base = OTHER; note = 2'-deoxy-2'-fluoroadenosine-3'-phosphate
  modified_base 9: mod_base = OTHER; note = 2'-deoxy-2'-fluoroadenosine-3'-phosphate
  modified_base 10: mod_base = OTHER; note = 2'-O-methylcytidine-3'-phosphate
  modified_base 11: mod_base = OTHER; note = 2'-O-methyladenosine-3'-phosphate
  modified_base 12: mod_base = OTHER; note = 2'-O-methyluridine-3'-phosphate
  modified_base 13: mod_base = OTHER; note = 2'-O-methyluridine-3'-phosphate
  modified_base 14: mod_base = OTHER; note = 2'-deoxy-2'-fluorouridine-3'-phosphate
  modified_base 15: mod_base = OTHER; note = 2'-O-methyluridine-3'-phosphate
  modified_base 16: mod_base = OTHER; note = 2'-deoxy-2'-fluoroguanosine-3'-phosphate
  modified_base 17: mod_base = OTHER; note = 2'-O-methyladenosine-3'-phosphate
  modified_base 18: mod_base = OTHER; note = 2'-O-methylcytidine-3'-phosphate
  modified_base 19: mod_base = OTHER; note = 2'-O-methyladenosine-3'-phosphate
  modified_base 20: mod_base = OTHER; note = 2'-O-methylcytidine-3'-phosphate
  modified_base 21: mod_base = OTHER; note = 2'-O-methyladenosine-3'-phosphorothioate
  modified_base 22: mod_base = OTHER; note = 2'-O-methyladenosine-3'-phosphorothioate
  modified_base 23: mod_base = OTHER; note = 2'-O-methyladenosine
tatgtagaacattttgacacaaa

SEQ ID NO: 274 - RNA, 21 nt, synthetic construct
  source 1..21: mol_type = other RNA
  modified_base 1: mod_base = OTHER; note = 2'-O-methylguanosine-3'-phosphorothioate
  modified_base 2: mod_base = OTHER; note = 2'-O-methyluridine-3'-phosphorothioate
  modified_base 3: mod_base = OTHER; note = 2'-O-methylguanosine-3'-phosphate
  modified_base 4: mod_base = OTHER; note = 2'-O-methyluridine-3'-phosphate
  modified_base 5: mod_base = OTHER; note = 2'-O-methylcytidine-3'-phosphate
  modified_base 6: mod_base = OTHER; note = 2'-O-methyladenosine-3'-phosphate
  modified_base 7: mod_base = OTHER; note = 2'-deoxy-2'-fluoroadenosine-3'-phosphate
  modified_base 8: mod_base = OTHER; note = 2'-O-methyladenosine-3'-phosphate
  modified_base 9: mod_base = OTHER; note = 2'-deoxy-2'-fluoroadenosine-3'-phosphate
  modified_base 10: mod_base = OTHER; note = 2'-deoxy-2'-fluorouridine-3'-phosphate
  modified_base 11: mod_base = OTHER; note = 2'-deoxy-2'-fluoroguanosine-3'-phosphate
  modified_base 12: mod_base = OTHER; note = 2'-O-methyluridine-3'-phosphate
  modified_base 13: mod_base = OTHER; note = 2'-O-methyluridine-3'-phosphate
  modified_base 14: mod_base = OTHER; note = 2'-O-methylcytidine-3'-phosphate
  modified_base 15: mod_base = OTHER; note = 2'-O-methyluridine-3'-phosphate
  modified_base 16: mod_base = OTHER; note = 2'-O-methyladenosine-3'-phosphate
  modified_base 17: mod_base = OTHER; note = 2'-O-methylcytidine-3'-phosphate
  modified_base 18: mod_base = OTHER; note = 2'-O-methyladenosine-3'-phosphate
  modified_base 19: mod_base = OTHER; note = 2'-O-methyluridine-3'-phosphate
  modified_base 20: mod_base = OTHER; note = 2'-O-methyluridine-3'-phosphate
  modified_base 21: mod_base = OTHER; note = 2'-O-methyladenosine-3'-phosphate
gtgtcaaaatgttctacatta

SEQ ID NO: 275 - RNA, 23 nt, synthetic construct
  source 1..23: mol_type = other RNA
  modified_base 1: mod_base = OTHER; note = 2'-O-methyluridine-3'-phosphorothioate
  modified_base 2: mod_base = OTHER; note = 2'-deoxy-2'-fluoroadenosine-3'-phosphorothioate
  modified_base 3: mod_base = OTHER; note = 2'-O-methyladenosine-3'-phosphate
  modified_base 4: mod_base = OTHER; note = 2'-O-methyluridine-3'-phosphate
  modified_base 5: mod_base = OTHER; note = 2'-O-methylguanosine-3'-phosphate
  modified_base 6: mod_base = OTHER; note = 2'-deoxy-2'-fluorouridine-3'-phosphate
  modified_base 7: mod_base = OTHER; note = 2'-O-methyladenosine-3'-phosphate
  modified_base 8: mod_base = OTHER; note = 2'-deoxy-2'-fluoroguanosine-3'-phosphate
  modified_base 9: mod_base = OTHER; note = 2'-deoxy-2'-fluoroadenosine-3'-phosphate
  modified_base 10: mod_base = OTHER; note = 2'-O-methyladenosine-3'-phosphate
  modified_base 11: mod_base = OTHER; note = 2'-O-methylcytidine-3'-phosphate
  modified_base 12: mod_base = OTHER; note = 2'-O-methyladenosine-3'-phosphate
  modified_base 13: mod_base = OTHER; note = 2'-O-methyluridine-3'-phosphate
  modified_base 14: mod_base = OTHER; note = 2'-deoxy-2'-fluorouridine-3'-phosphate
  modified_base 15: mod_base = OTHER; note = 2'-O-methyluridine-3'-phosphate
  modified_base 16: mod_base = OTHER; note = 2'-deoxy-2'-fluorouridine-3'-phosphate
  modified_base 17: mod_base = OTHER; note = 2'-O-methylguanosine-3'-phosphate
  modified_base 18: mod_base = OTHER; note = 2'-O-methyladenosine-3'-phosphate
  modified_base 19: mod_base = OTHER; note = 2'-O-methylcytidine-3'-phosphate
  modified_base 20: mod_base = OTHER; note = 2'-O-methyladenosine-3'-phosphate
  modified_base 21: mod_base = OTHER; note = 2'-O-methylcytidine-3'-phosphorothioate
  modified_base 22: mod_base = OTHER; note = 2'-O-methyladenosine-3'-phosphorothioate
  modified_base 23: mod_base = OTHER; note = 2'-O-methyladenosine
taatgtagaacattttgacacaa

SEQ ID NO: 276 - RNA, 21 nt, synthetic construct
  source 1..21: mol_type = other RNA
  modified_base 1: mod_base = OTHER; note = 2'-O-methyluridine-3'-phosphorothioate
  modified_base 2: mod_base = OTHER; note = 2'-O-methylguanosine-3'-phosphorothioate
  modified_base 3: mod_base = OTHER; note = 2'-O-methyluridine-3'-phosphate
  modified_base 4: mod_base = OTHER; note = 2'-O-methylcytidine-3'-phosphate
  modified_base 5: mod_base = OTHER; note = 2'-O-methyladenosine-3'-phosphate
  modified_base 6: mod_base = OTHER; note = 2'-O-methyladenosine-3'-phosphate
  modified_base 7: mod_base = OTHER; note = 2'-deoxy-2'-fluoroadenosine-3'-phosphate
  modified_base 8: mod_base = OTHER; note = 2'-O-methyladenosine-3'-phosphate
  modified_base 9: mod_base = OTHER; note = 2'-deoxy-2'-fluorouridine-3'-phosphate
  modified_base 10: mod_base = OTHER; note = 2'-deoxy-2'-fluoroguanosine-3'-phosphate
  modified_base 11: mod_base = OTHER; note = 2'-deoxy-2'-fluorouridine-3'-phosphate
  modified_base 12: mod_base = OTHER; note = 2'-O-methyluridine-3'-phosphate
  modified_base 13: mod_base = OTHER; note = 2'-O-methylcytidine-3'-phosphate
  modified_base 14: mod_base = OTHER; note = 2'-O-methyluridine-3'-phosphate
  modified_base 15: mod_base = OTHER; note = 2'-O-methyladenosine-3'-phosphate
  modified_base 16: mod_base = OTHER; note = 2'-O-methylcytidine-3'-phosphate
  modified_base 17: mod_base = OTHER; note = 2'-O-methyladenosine-3'-phosphate
  modified_base 18: mod_base = OTHER; note = 2'-O-methyluridine-3'-phosphate
  modified_base 19: mod_base = OTHER; note = 2'-O-methyluridine-3'-phosphate
  modified_base 20: mod_base = OTHER; note = 2'-O-methyladenosine-3'-phosphate
  modified_base 21: mod_base = OTHER; note = 2'-O-methyladenosine-3'-phosphate
tgtcaaaatgttctacattaa

SEQ ID NO: 277 - skipped

SEQ ID NO: 278 - RNA, 23 nt, synthetic construct
  source 1..23: mol_type = other RNA
  modified_base 1: mod_base = OTHER; note = 2'-O-methyluridine-3'-phosphorothioate
  modified_base 2: mod_base = OTHER; note = 2'-deoxy-2'-fluorouridine-3'-phosphorothioate
  modified_base 3: mod_base = OTHER; note = 2'-O-methyladenosine-3'-phosphate
  modified_base 4: mod_base = OTHER; note = 2'-O-methyladenosine-3'-phosphate
  modified_base 5: mod_base = OTHER; note = 2'-O-methyluridine-3'-phosphate
  modified_base 6: mod_base = OTHER; note = 2'-deoxy-2'-fluoroguanosine-3'-phosphate
  modified_base 7: mod_base = OTHER; note = 2'-O-methyluridine-3'-phosphate
  modified_base 8: mod_base = OTHER; note = 2'-deoxy-2'-fluoroadenosine-3'-phosphate
  modified_base 9: mod_base = OTHER; note = 2'-deoxy-2'-fluoroguanosine-3'-phosphate
  modified_base 10: mod_base = OTHER; note = 2'-O-methyladenosine-3'-phosphate
  modified_base 11: mod_base = OTHER; note = 2'-O-methyladenosine-3'-phosphate
  modified_base 12: mod_base = OTHER; note = 2'-O-methylcytidine-3'-phosphate
  modified_base 13: mod_base = OTHER; note = 2'-O-methyladenosine-3'-phosphate
  modified_base 14: mod_base = OTHER; note = 2'-deoxy-2'-fluorouridine-3'-phosphate
  modified_base 15: mod_base = OTHER; note = 2'-O-methyluridine-3'-phosphate
  modified_base 16: mod_base = OTHER; note = 2'-deoxy-2'-fluorouridine-3'-phosphate
  modified_base 17: mod_base = OTHER; note = 2'-O-methyluridine-3'-phosphate
  modified_base 18: mod_base = OTHER; note = 2'-O-methylguanosine-3'-phosphate
  modified_base 19: mod_base = OTHER; note = 2'-O-methyladenosine-3'-phosphate
  modified_base 20: mod_base = OTHER; note = 2'-O-methylcytidine-3'-phosphate
  modified_base 21: mod_base = OTHER; note = 2'-O-methyladenosine-3'-phosphorothioate
  modified_base 22: mod_base = OTHER; note = 2'-O-methylcytidine-3'-phosphorothioate
  modified_base 23: mod_base = OTHER; note = 2'-O-methyladenosine
ttaatgtagaacattttgacaca

SEQ ID NO: 279 - RNA, 21 nt, synthetic construct
  source 1..21: mol_type = other RNA
  modified_base 1: mod_base = OTHER; note = 2'-O-methyladenosine-3'-phosphorothioate
  modified_base 2: mod_base = OTHER; note = 2'-O-methyladenosine-3'-phosphorothioate
  modified_base 3: mod_base = OTHER; note = 2'-O-methyluridine-3'-phosphate
  modified_base 4: mod_base = OTHER; note = 2'-O-methylguanosine-3'-phosphate
  modified_base 5: mod_base = OTHER; note = 2'-O-methyluridine-3'-phosphate
  modified_base 6: mod_base = OTHER; note = 2'-O-methyluridine-3'-phosphate
  modified_base 7: mod_base = OTHER; note = 2'-deoxy-2'-fluorocytidine-3'-phosphate
  modified_base 8: mod_base = OTHER; note = 2'-O-methyluridine-3'-phosphate
  modified_base 9: mod_base = OTHER; note = 2'-deoxy-2'-fluoroadenosine-3'-phosphate
  modified_base 10: mod_base = OTHER; note = 2'-deoxy-2'-fluorocytidine-3'-phosphate
  modified_base 11: mod_base = OTHER; note = 2'-deoxy-2'-fluoroadenosine-3'-phosphate
  modified_base 12: mod_base = OTHER; note = 2'-O-methyluridine-3'-phosphate
  modified_base 13: mod_base = OTHER; note = 2'-O-methyluridine-3'-phosphate
  modified_base 14: mod_base = OTHER; note = 2'-O-methyladenosine-3'-phosphate
  modified_base 15: mod_base = OTHER; note = 2'-O-methyladenosine-3'-phosphate
  modified_base 16: mod_base = OTHER; note = 2'-O-methylguanosine-3'-phosphate
  modified_base 17: mod_base = OTHER; note = 2'-O-methylcytidine-3'-phosphate
  modified_base 18: mod_base = OTHER; note = 2'-O-methylcytidine-3'-phosphate
  modified_base 19: mod_base = OTHER; note = 2'-O-methyladenosine-3'-phosphate
  modified_base 20: mod_base = OTHER; note = 2'-O-methyladenosine-3'-phosphate
  modified_base 21: mod_base = OTHER; note = 2'-O-methyladenosine-3'-phosphate
aatgttctacattaagccaaa

SEQ ID NO: 280 - RNA, 23 nt, synthetic construct
  source 1..23: mol_type = other RNA
  modified_base 1: mod_base = OTHER; note = 2'-O-methyluridine-3'-phosphorothioate
  modified_base 2: mod_base = OTHER; note = 2'-deoxy-2'-fluorouridine-3'-phosphorothioate
  modified_base 3: mod_base = OTHER; note = 2'-O-methyluridine-3'-phosphate
  modified_base 4: mod_base = OTHER; note = 2'-O-methylguanosine-3'-phosphate
  modified_base 5: mod_base = OTHER; note = 2'-O-methylguanosine-3'-phosphate
  modified_base 6: mod_base = OTHER; note = 2'-deoxy-2'-fluorocytidine-3'-phosphate
  modified_base 7: mod_base = OTHER; note = 2'-O-methyluridine-3'-phosphate
  modified_base 8: mod_base = OTHER; note = 2'-deoxy-2'-fluorouridine-3'-phosphate
  modified_base 9: mod_base = OTHER; note = 2'-deoxy-2'-fluoroadenosine-3'-phosphate
  modified_base 10: mod_base = OTHER; note = 2'-O-methyladenosine-3'-phosphate
  modified_base 11: mod_base = OTHER; note = 2'-O-methyluridine-3'-phosphate
  modified_base 12: mod_base = OTHER; note = 2'-O-methylguanosine-3'-phosphate
  modified_base 13: mod_base = OTHER; note = 2'-O-methyluridine-3'-phosphate
  modified_base 14: mod_base = OTHER; note = 2'-deoxy-2'-fluoroadenosine-3'-phosphate
  modified_base 15: mod_base = OTHER; note = 2'-O-methylguanosine-3'-phosphate
  modified_base 16: mod_base = OTHER; note = 2'-deoxy-2'-fluoroadenosine-3'-phosphate
  modified_base 17: mod_base = OTHER; note = 2'-O-methyladenosine-3'-phosphate
  modified_base 18: mod_base = OTHER; note = 2'-O-methylcytidine-3'-phosphate
  modified_base 19: mod_base = OTHER; note = 2'-O-methyladenosine-3'-phosphate
  modified_base 20: mod_base = OTHER; note = 2'-O-methyluridine-3'-phosphate
  modified_base 21: mod_base = OTHER; note = 2'-O-methyluridine-3'-phosphorothioate
  modified_base 22: mod_base = OTHER; note = 2'-O-methyluridine-3'-phosphorothioate
  modified_base 23: mod_base = OTHER; note = 2'-O-methyluridine
tttggcttaatgtagaacatttt

SEQ ID NO: 281 - RNA, 21 nt, synthetic construct
  source 1..21: mol_type = other RNA
  modified_base 1: mod_base = OTHER; note = 2'-O-methyladenosine-3'-phosphorothioate
  modified_base 2: mod_base = OTHER; note = 2'-O-methyluridine-3'-phosphorothioate
  modified_base 3: mod_base = OTHER; note = 2'-O-methylguanosine-3'-phosphate
  modified_base 4: mod_base = OTHER; note = 2'-O-methyluridine-3'-phosphate
  modified_base 5: mod_base = OTHER; note = 2'-O-methyluridine-3'-phosphate
  modified_base 6: mod_base = OTHER; note = 2'-O-methylcytidine-3'-phosphate
  modified_base 7: mod_base = OTHER; note = 2'-deoxy-2'-fluorouridine-3'-phosphate
  modified_base 8: mod_base = OTHER; note = 2'-O-methyladenosine-3'-phosphate
  modified_base 9: mod_base = OTHER; note = 2'-deoxy-2'-fluorocytidine-3'-phosphate
  modified_base 10: mod_base = OTHER; note = 2'-deoxy-2'-fluoroadenosine-3'-phosphate
  modified_base 11: mod_base = OTHER; note = 2'-deoxy-2'-fluorouridine-3'-phosphate
  modified_base 12: mod_base = OTHER; note = 2'-O-methyluridine-3'-phosphate
  modified_base 13: mod_base = OTHER; note = 2'-O-methyladenosine-3'-phosphate
  modified_base 14: mod_base = OTHER; note = 2'-O-methyladenosine-3'-phosphate
  modified_base 15: mod_base = OTHER; note = 2'-O-methylguanosine-3'-phosphate
  modified_base 16: mod_base = OTHER; note = 2'-O-methylcytidine-3'-phosphate
  modified_base 17: mod_base = OTHER; note = 2'-O-methylcytidine-3'-phosphate
  modified_base 18: mod_base = OTHER; note = 2'-O-methyladenosine-3'-phosphate
  modified_base 19: mod_base = OTHER; note = 2'-O-methyladenosine-3'-phosphate
  modified_base 20: mod_base = OTHER; note = 2'-O-methyluridine-3'-phosphate
  modified_base 21: mod_base = OTHER; note = 2'-O-methyladenosine-3'-phosphate
atgttctacattaagccaata

SEQ ID NO: 282 - RNA, 23 nt, synthetic construct
  source 1..23: mol_type = other RNA
  modified_base 1: mod_base = OTHER; note = 2'-O-methyluridine-3'-phosphorothioate
  modified_base 2: mod_base = OTHER; note = 2'-deoxy-2'-fluoroadenosine-3'-phosphorothioate
  modified_base 3: mod_base = OTHER; note = 2'-O-methyluridine-3'-phosphate
  modified_base 4: mod_base = OTHER; note = 2'-O-methyluridine-3'-phosphate
  modified_base 5: mod_base = OTHER; note = 2'-O-methylguanosine-3'-phosphate
  modified_base 6: mod_base = OTHER; note = 2'-deoxy-2'-fluoroguanosine-3'-phosphate
  modified_base 7: mod_base = OTHER; note = 2'-O-methylcytidine-3'-phosphate
  modified_base 8: mod_base = OTHER; note = 2'-deoxy-2'-fluorouridine-3'-phosphate
  modified_base 9: mod_base = OTHER; note = 2'-deoxy-2'-fluorouridine-3'-phosphate
  modified_base 10: mod_base = OTHER; note = 2'-O-methyladenosine-3'-phosphate
  modified_base 11: mod_base = OTHER; note = 2'-O-methyladenosine-3'-phosphate
  modified_base 12: mod_base = OTHER; note = 2'-O-methyluridine-3'-phosphate
  modified_base 13: mod_base = OTHER; note = 2'-O-methylguanosine-3'-phosphate
  modified_base 14: mod_base = OTHER; note = 2'-deoxy-2'-fluorouridine-3'-phosphate
  modified_base 15: mod_base = OTHER; note = 2'-O-methyladenosine-3'-phosphate
  modified_base 16: mod_base = OTHER; note = 2'-deoxy-2'-fluoroguanosine-3'-phosphate
  modified_base 17: mod_base = OTHER; note = 2'-O-methyladenosine-3'-phosphate
  modified_base 18: mod_base = OTHER; note = 2'-O-methyladenosine-3'-phosphate
  modified_base 19: mod_base = OTHER; note = 2'-O-methylcytidine-3'-phosphate
  modified_base 20: mod_base = OTHER; note = 2'-O-methyladenosine-3'-phosphate
  modified_base 21: mod_base = OTHER; note = 2'-O-methyluridine-3'-phosphorothioate
  modified_base 22: mod_base = OTHER; note = 2'-O-methyluridine-3'-phosphorothioate
  modified_base 23: mod_base = OTHER; note = 2'-O-methyluridine
tattggcttaatgtagaacattt

SEQ ID NO: 283 - RNA, 21 nt, synthetic construct
  source 1..21: mol_type = other RNA
  modified_base 1: mod_base = OTHER; note = 2'-O-methyluridine-3'-phosphorothioate
  modified_base 2: mod_base = OTHER; note = 2'-O-methyluridine-3'-phosphorothioate
  modified_base 3: mod_base = OTHER; note = 2'-O-methylcytidine-3'-phosphate
  modified_base 4: mod_base = OTHER; note = 2'-O-methyluridine-3'-phosphate
  modified_base 5: mod_base = OTHER; note = 2'-O-methyladenosine-3'-phosphate
  modified_base 6: mod_base = OTHER; note = 2'-O-methylcytidine-3'-phosphate
  modified_base 7: mod_base = OTHER; note = 2'-deoxy-2'-fluoroadenosine-3'-phosphate
  modified_base 8: mod_base = OTHER; note = 2'-O-methyluridine-3'-phosphate
  modified_base 9: mod_base = OTHER; note = 2'-deoxy-2'-fluorouridine-3'-phosphate
  modified_base 10: mod_base = OTHER; note = 2'-deoxy-2'-fluoroadenosine-3'-phosphate
  modified_base 11: mod_base = OTHER; note = 2'-deoxy-2'-fluoroadenosine-3'-phosphate
  modified_base 12: mod_base = OTHER; note = 2'-O-methylguanosine-3'-phosphate
  modified_base 13: mod_base = OTHER; note = 2'-O-methylcytidine-3'-phosphate
  modified_base 14: mod_base = OTHER; note = 2'-O-methylcytidine-3'-phosphate
  modified_base 15: mod_base = OTHER; note = 2'-O-methyladenosine-3'-phosphate
  modified_base 16: mod_base = OTHER; note = 2'-O-methyladenosine-3'-phosphate
  modified_base 17: mod_base = OTHER; note = 2'-O-methyluridine-3'-phosphate
  modified_base 18: mod_base = OTHER; note = 2'-O-methyluridine-3'-phosphate
  modified_base 19: mod_base = OTHER; note = 2'-O-methyladenosine-3'-phosphate
  modified_base 20: mod_base = OTHER; note = 2'-O-methyladenosine-3'-phosphate
  modified_base 21: mod_base = OTHER; note = 2'-O-methyladenosine-3'-phosphate
ttctacattaagccaattaaa

SEQ ID NO: 284 - RNA, 23 nt, synthetic construct
  source 1..23: mol_type = other RNA
  modified_base 1: mod_base = OTHER; note = 2'-O-methyluridine-3'-phosphorothioate
  modified_base 2: mod_base = OTHER; note = 2'-deoxy-2'-fluorouridine-3'-phosphorothioate
  modified_base 3: mod_base = OTHER; note = 2'-O-methyluridine-3'-phosphate
  modified_base 4: mod_base = OTHER; note = 2'-O-methyladenosine-3'-phosphate
  modified_base 5: mod_base = OTHER; note = 2'-O-methyladenosine-3'-phosphate
  modified_base 6: mod_base = OTHER; note = 2'-deoxy-2'-fluorouridine-3'-phosphate
  modified_base 7: mod_base = OTHER; note = 2'-O-methyluridine-3'-phosphate
  modified_base 8: mod_base = OTHER; note = 2'-deoxy-2'-fluoroguanosine-3'-phosphate
  modified_base 9: mod_base = OTHER; note = 2'-deoxy-2'-fluoroguanosine-3'-phosphate
  modified_base 10: mod_base = OTHER; note = 2'-O-methylcytidine-3'-phosphate
  modified_base 11: mod_base = OTHER; note = 2'-O-methyluridine-3'-phosphate
  modified_base 12: mod_base = OTHER; note = 2'-O-methyluridine-3'-phosphate
  modified_base 13: mod_base = OTHER; note = 2'-O-methyladenosine-3'-phosphate
  modified_base 14: mod_base = OTHER; note = 2'-deoxy-2'-fluoroadenosine-3'-phosphate
  modified_base 15: mod_base = OTHER; note = 2'-O-methyluridine-3'-phosphate
  modified_base 16: mod_base = OTHER; note = 2'-deoxy-2'-fluoroguanosine-3'-phosphate
  modified_base 17: mod_base = OTHER; note = 2'-O-methyluridine-3'-phosphate
  modified_base 18: mod_base = OTHER; note = 2'-O-methyladenosine-3'-phosphate
  modified_base 19: mod_base = OTHER; note = 2'-O-methylguanosine-3'-phosphate
  modified_base 20: mod_base = OTHER; note = 2'-O-methyladenosine-3'-phosphate
  modified_base 21: mod_base = OTHER; note = 2'-O-methyladenosine-3'-phosphorothioate
  modified_base 22: mod_base = OTHER; note = 2'-O-methylcytidine-3'-phosphorothioate
  modified_base 23: mod_base = OTHER; note = 2'-O-methyladenosine
tttaattggcttaatgtagaaca

SEQ ID NO: 285 - RNA, 21 nt, synthetic construct
  source 1..21: mol_type = other RNA
  modified_base 1: mod_base = OTHER; note = 2'-O-methyluridine-3'-phosphorothioate
  modified_base 2: mod_base = OTHER; note = 2'-O-methylcytidine-3'-phosphorothioate
  modified_base 3: mod_base = OTHER; note = 2'-O-methyluridine-3'-phosphate
  modified_base 4: mod_base = OTHER; note = 2'-O-methyladenosine-3'-phosphate
  modified_base 5: mod_base = OTHER; note = 2'-O-methylcytidine-3'-phosphate
  modified_base 6: mod_base = OTHER; note = 2'-O-methyladenosine-3'-phosphate
  modified_base 7: mod_base = OTHER; note = 2'-deoxy-2'-fluorouridine-3'-phosphate
  modified_base 8: mod_base = OTHER; note = 2'-O-methyluridine-3'-phosphate
  modified_base 9: mod_base = OTHER; note = 2'-deoxy-2'-fluoroadenosine-3'-phosphate
  modified_base 10: mod_base = OTHER; note = 2'-deoxy-2'-fluoroadenosine-3'-phosphate
  modified_base 11: mod_base = OTHER; note = 2'-deoxy-2'-fluoroguanosine-3'-phosphate
  modified_base 12: mod_base = OTHER; note = 2'-O-methylcytidine-3'-phosphate
  modified_base 13: mod_base = OTHER; note = 2'-O-methylcytidine-3'-phosphate
  modified_base 14: mod_base = OTHER; note = 2'-O-methyladenosine-3'-phosphate
  modified_base 15: mod_base = OTHER; note = 2'-O-methyladenosine-3'-phosphate
  modified_base 16: mod_base = OTHER; note = 2'-O-methyluridine-3'-phosphate
  modified_base 17: mod_base = OTHER; note = 2'-O-methyluridine-3'-phosphate
  modified_base 18: mod_base = OTHER; note = 2'-O-methyladenosine-3'-phosphate
  modified_base 19: mod_base = OTHER; note = 2'-O-methyladenosine-3'-phosphate
  modified_base 20: mod_base = OTHER; note = 2'-O-methylguanosine-3'-phosphate
  modified_base 21: mod_base = OTHER; note = 2'-O-methyladenosine-3'-phosphate
tctacattaagccaattaaga

SEQ ID NO: 286 - RNA, 23 nt, synthetic construct
  source 1..23: mol_type = other RNA
  modified_base 1: mod_base = OTHER; note = 2'-O-methyluridine-3'-phosphorothioate
  modified_base 2: mod_base = OTHER; note = 2'-deoxy-2'-fluorocytidine-3'-phosphorothioate
  modified_base 3: mod_base = OTHER; note = 2'-O-methyluridine-3'-phosphate
  modified_base 4: mod_base = OTHER; note = 2'-O-methyluridine-3'-phosphate
  modified_base 5: mod_base = OTHER; note = 2'-O-methyladenosine-3'-phosphate
  modified_base 6: mod_base = OTHER; note = 2'-deoxy-2'-fluoroadenosine-3'-phosphate
  modified_base 7: mod_base = OTHER; note = 2'-O-methyluridine-3'-phosphate
  modified_base 8: mod_base = OTHER; note = 2'-deoxy-2'-fluorouridine-3'-phosphate
  modified_base 9: mod_base = OTHER; note = 2'-deoxy-2'-fluoroguanosine-3'-phosphate
  modified_base 10: mod_base = OTHER; note = 2'-O-methylguanosine-3'-phosphate
  modified_base 11: mod_base = OTHER; note = 2'-O-methylcytidine-3'-phosphate
  modified_base 12: mod_base = OTHER; note = 2'-O-methyluridine-3'-phosphate
  modified_base 13: mod_base = OTHER; note = 2'-O-methyluridine-3'-phosphate
  modified_base 14: mod_base = OTHER; note = 2'-deoxy-2'-fluoroadenosine-3'-phosphate
  modified_base 15: mod_base = OTHER; note = 2'-O-methyladenosine-3'-phosphate
  modified_base 16: mod_base = OTHER; note = 2'-deoxy-2'-fluorouridine-3'-phosphate
  modified_base 17: mod_base = OTHER; note = 2'-O-methylguanosine-3'-phosphate
  modified_base 18: mod_base = OTHER; note = 2'-O-methyluridine-3'-phosphate
  modified_base 19: mod_base = OTHER; note = 2'-O-methyladenosine-3'-phosphate
  modified_base 20: mod_base = OTHER; note = 2'-O-methylguanosine-3'-phosphate
  modified_base 21: mod_base = OTHER; note = 2'-O-methyladenosine-3'-phosphorothioate
  modified_base 22: mod_base = OTHER; note = 2'-O-methyladenosine-3'-phosphorothioate
  modified_base 23: mod_base = OTHER; note = 2'-O-methylcytidine
tcttaattggcttaatgtagaac

SEQ ID NO: 287 - RNA, 21 nt, synthetic construct
  source 1..21: mol_type = other RNA
  modified_base 1: mod_base = OTHER; note = 2'-O-methylcytidine-3'-phosphorothioate
  modified_base 2: mod_base = OTHER; note = 2'-O-methyluridine-3'-phosphorothioate
  modified_base 3: mod_base = OTHER; note = 2'-O-methyladenosine-3'-phosphate
  modified_base 4: mod_base = OTHER; note = 2'-O-methylcytidine-3'-phosphate
  modified_base 5: mod_base = OTHER; note = 2'-O-methyladenosine-3'-phosphate
  modified_base 6: mod_base = OTHER; note = 2'-O-methyluridine-3'-phosphate
  modified_base 7: mod_base = OTHER; note = 2'-deoxy-2'-fluorouridine-3'-phosphate
  modified_base 8: mod_base = OTHER; note = 2'-O-methyladenosine-3'-phosphate
  modified_base 9: mod_base = OTHER; note = 2'-deoxy-2'-fluoroadenosine-3'-phosphate
  modified_base 10: mod_base = OTHER; note = 2'-deoxy-2'-fluoroguanosine-3'-phosphate
  modified_base 11: mod_base = OTHER; note = 2'-deoxy-2'-fluorocytidine-3'-phosphate
  modified_base 12: mod_base = OTHER; note = 2'-O-methylcytidine-3'-phosphate
  modified_base 13: mod_base = OTHER; note = 2'-O-methyladenosine-3'-phosphate
  modified_base 14: mod_base = OTHER; note = 2'-O-methyladenosine-3'-phosphate
  modified_base 15: mod_base = OTHER; note = 2'-O-methyluridine-3'-phosphate
  modified_base 16: mod_base = OTHER; note = 2'-O-methyluridine-3'-phosphate
  modified_base 17: mod_base = OTHER; note = 2'-O-methyladenosine-3'-phosphate
  modified_base 18: mod_base = OTHER; note = 2'-O-methyladenosine-3'-phosphate
  modified_base 19: mod_base = OTHER; note = 2'-O-methylguanosine-3'-phosphate
  modified_base 20: mod_base = OTHER; note = 2'-O-methyluridine-3'-phosphate
  modified_base 21: mod_base = OTHER; note = 2'-O-methyladenosine-3'-phosphate
ctacattaagccaattaagta

SEQ ID NO: 288 - RNA, 23 nt, synthetic construct
  source 1..23: mol_type = other RNA
  modified_base 1: mod_base = OTHER; note = 2'-O-methyluridine-3'-phosphorothioate
  modified_base 2: mod_base = OTHER; note = 2'-deoxy-2'-fluoroadenosine-3'-phosphorothioate
  modified_base 3: mod_base = OTHER; note = 2'-O-methylcytidine-3'-phosphate
  modified_base 4: mod_base = OTHER; note = 2'-O-methyluridine-3'-phosphate
  modified_base 5: mod_base = OTHER; note = 2'-O-methyluridine-3'-phosphate
  modified_base 6: mod_base = OTHER; note = 2'-deoxy-2'-fluoroadenosine-3'-phosphate
  modified_base 7: mod_base = OTHER; note = 2'-O-methyladenosine-3'-phosphate
  modified_base 8: mod_base = OTHER; note = 2'-deoxy-2'-fluorouridine-3'-phosphate
  modified_base 9: mod_base = OTHER; note = 2'-deoxy-2'-fluorouridine-3'-phosphate
  modified_base 10: mod_base = OTHER; note = 2'-O-methylguanosine-3'-phosphate
  modified_base 11: mod_base = OTHER; note = 2'-O-methylguanosine-3'-phosphate
  modified_base 12: mod_base = OTHER; note = 2'-O-methylcytidine-3'-phosphate
  modified_base 13: mod_base = OTHER; note = 2'-O-methyluridine-3'-phosphate
  modified_base 14: mod_base = OTHER; note = 2'-deoxy-2'-fluorouridine-3'-phosphate
  modified_base 15: mod_base = OTHER; note = 2'-O-methyladenosine-3'-phosphate
  modified_base 16: mod_base = OTHER; note = 2'-deoxy-2'-fluoroadenosine-3'-phosphate
  modified_base 17: mod_base = OTHER; note = 2'-O-methyluridine-3'-phosphate
  modified_base 18: mod_base = OTHER; note = 2'-O-methylguanosine-3'-phosphate
  modified_base 19: mod_base = OTHER; note = 2'-O-methyluridine-3'-phosphate
  modified_base 20: mod_base = OTHER; note = 2'-O-methyladenosine-3'-phosphate
  modified_base 21: mod_base = OTHER; note = 2'-O-methylguanosine-3'-phosphorothioate
  modified_base 22: mod_base = OTHER; note = 2'-O-methyladenosine-3'-phosphorothioate
  modified_base 23: mod_base = OTHER; note = 2'-O-methyladenosine
tacttaattggcttaatgtagaa

SEQ ID NO: 289 - RNA, 21 nt, synthetic construct
  source 1..21: mol_type = other RNA
  modified_base 1: mod_base = OTHER; note = 2'-O-methyluridine-3'-phosphorothioate
  modified_base 2: mod_base = OTHER; note = 2'-O-methyladenosine-3'-phosphorothioate
  modified_base 3: mod_base = OTHER; note = 2'-O-methylcytidine-3'-phosphate
  modified_base 4: mod_base = OTHER; note = 2'-O-methyladenosine-3'-phosphate
  modified_base 5: mod_base = OTHER; note = 2'-O-methyluridine-3'-phosphate
  modified_base 6: mod_base = OTHER; note = 2'-O-methyluridine-3'-phosphate
  modified_base 7: mod_base = OTHER; note = 2'-deoxy-2'-fluoroadenosine-3'-phosphate
  modified_base 8: mod_base = OTHER; note = 2'-O-methyladenosine-3'-phosphate
  modified_base 9: mod_base = OTHER; note = 2'-deoxy-2'-fluoroguanosine-3'-phosphate
  modified_base 10: mod_base = OTHER; note = 2'-deoxy-2'-fluorocytidine-3'-phosphate
  modified_base 11: mod_base = OTHER; note = 2'-deoxy-2'-fluorocytidine-3'-phosphate
  modified_base 12: mod_base = OTHER; note = 2'-O-methyladenosine-3'-phosphate
  modified_base 13: mod_base = OTHER; note = 2'-O-methyladenosine-3'-phosphate
  modified_base 14: mod_base = OTHER; note = 2'-O-methyluridine-3'-phosphate
  modified_base 15: mod_base = OTHER; note = 2'-O-methyluridine-3'-phosphate
  modified_base 16: mod_base = OTHER; note = 2'-O-methyladenosine-3'-phosphate
  modified_base 17: mod_base = OTHER; note = 2'-O-methyladenosine-3'-phosphate
  modified_base 18: mod_base = OTHER; note = 2'-O-methylguanosine-3'-phosphate
  modified_base 19: mod_base = OTHER; note = 2'-O-methyluridine-3'-phosphate
  modified_base 20: mod_base = OTHER; note = 2'-O-methyladenosine-3'-phosphate
  modified_base 21: mod_base = OTHER; note = 2'-O-methyladenosine-3'-phosphate
tacattaagccaattaagtaa

SEQ ID NO: 290 - RNA, 23 nt, synthetic construct
  source 1..23: mol_type = other RNA
  modified_base 1: mod_base = OTHER; note = 2'-O-methyluridine-3'-phosphorothioate
  modified_base 2: mod_base = OTHER; note = 2'-deoxy-2'-fluorouridine-3'-phosphorothioate
  modified_base 3: mod_base = OTHER; note = 2'-O-methyladenosine-3'-phosphate
  modified_base 4: mod_base = OTHER; note = 2'-O-methylcytidine-3'-phosphate
  modified_base 5: mod_base = OTHER; note = 2'-O-methyluridine-3'-phosphate
  modified_base 6: mod_base = OTHER; note = 2'-deoxy-2'-fluorouridine-3'-phosphate
  modified_base 7: mod_base = OTHER; note = 2'-O-methyladenosine-3'-phosphate
  modified_base 8: mod_base = OTHER; note = 2'-deoxy-2'-fluoroadenosine-3'-phosphate
  modified_base 9: mod_base = OTHER; note = 2'-deoxy-2'-fluorouridine-3'-phosphate
  modified_base 10: mod_base = OTHER; note = 2'-O-methyluridine-3'-phosphate
  modified_base 11: mod_base = OTHER; note = 2'-O-methylguanosine-3'-phosphate
  modified_base 12: mod_base = OTHER; note = 2'-O-methylguanosine-3'-phosphate
  modified_base 13: mod_base = OTHER; note = 2'-O-methylcytidine-3'-phosphate
  modified_base 14: mod_base = OTHER; note = 2'-deoxy-2'-fluorouridine-3'-phosphate
  modified_base 15: mod_base = OTHER; note = 2'-O-methyluridine-3'-phosphate
  modified_base 16: mod_base = OTHER; note = 2'-deoxy-2'-fluoroadenosine-3'-phosphate
  modified_base 17: mod_base = OTHER; note = 2'-O-methyladenosine-3'-phosphate
  modified_base 18: mod_base = OTHER; note = 2'-O-methyluridine-3'-phosphate
  modified_base 19: mod_base = OTHER; note = 2'-O-methylguanosine-3'-phosphate
  modified_base 20: mod_base = OTHER; note = 2'-O-methyluridine-3'-phosphate
  modified_base 21: mod_base = OTHER; note = 2'-O-methyladenosine-3'-phosphorothioate
  modified_base 22: mod_base = OTHER; note = 2'-O-methylguanosine-3'-phosphorothioate
  modified_base 23: mod_base = OTHER; note = 2'-O-methyladenosine
ttacttaattggcttaatgtaga

SEQ ID NO: 291 - RNA, 21 nt, synthetic construct
  source 1..21: mol_type = other RNA
  modified_base 1: mod_base = OTHER; note = 2'-O-methylcytidine-3'-phosphorothioate
  modified_base 2: mod_base = OTHER; note = 2'-O-methyladenosine-3'-phosphorothioate
  modified_base 3: mod_base = OTHER; note = 2'-O-methyluridine-3'-phosphate
  modified_base 4: mod_base = OTHER; note = 2'-O-methyluridine-3'-phosphate
  modified_base 5: mod_base = OTHER; note = 2'-O-methyladenosine-3'-phosphate
  modified_base 6: mod_base = OTHER; note = 2'-O-methyladenosine-3'-phosphate
  modified_base 7: mod_base = OTHER; note = 2'-deoxy-2'-fluoroguanosine-3'-phosphate
  modified_base 8: mod_base = OTHER; note = 2'-O-methylcytidine-3'-phosphate
  modified_base 9: mod_base = OTHER; note = 2'-deoxy-2'-fluorocytidine-3'-phosphate
  modified_base 10: mod_base = OTHER; note = 2'-deoxy-2'-fluoroadenosine-3'-phosphate
  modified_base 11: mod_base = OTHER; note = 2'-deoxy-2'-fluoroadenosine-3'-phosphate
  modified_base 12: mod_base = OTHER; note = 2'-O-methyluridine-3'-phosphate
  modified_base 13: mod_base = OTHER; note = 2'-O-methyluridine-3'-phosphate
  modified_base 14: mod_base = OTHER; note = 2'-O-methyladenosine-3'-phosphate
  modified_base 15: mod_base = OTHER; note = 2'-O-methyladenosine-3'-phosphate
  modified_base 16: mod_base = OTHER; note = 2'-O-methylguanosine-3'-phosphate
  modified_base 17: mod_base = OTHER; note = 2'-O-methyluridine-3'-phosphate
  modified_base 18: mod_base = OTHER; note = 2'-O-methyladenosine-3'-phosphate
  modified_base 19: mod_base = OTHER; note = 2'-O-methyluridine-3'-phosphate
  modified_base 20: mod_base = OTHER; note = 2'-O-methyladenosine-3'-phosphate
  modified_base 21: mod_base = OTHER; note = 2'-O-methyladenosine-3'-phosphate
cattaagccaattaagtataa

SEQ ID NO: 292 - RNA, 23 nt, synthetic construct
  source 1..23: mol_type = other RNA
  modified_base 1: mod_base = OTHER; note = 2'-O-methyluridine-3'-phosphorothioate
  modified_base 2: mod_base = OTHER; note = 2'-deoxy-2'-fluorouridine-3'-phosphorothioate
  modified_base 3: mod_base = OTHER; note = 2'-O-methyladenosine-3'-phosphate
  modified_base 4: mod_base = OTHER; note = 2'-O-methyluridine-3'-phosphate
  modified_base 5: mod_base = OTHER; note = 2'-O-methyladenosine-3'-phosphate
  modified_base 6: mod_base = OTHER; note = 2'-deoxy-2'-fluorocytidine-3'-phosphate
  modified_base 7: mod_base = OTHER; note = 2'-O-methyluridine-3'-phosphate
  modified_base 8: mod_base = OTHER; note = 2'-deoxy-2'-fluorouridine-3'-phosphate
  modified_base 9: mod_base = OTHER; note = 2'-deoxy-2'-fluoroadenosine-3'-phosphate
  modified_base 10: mod_base = OTHER; note = 2'-O-methyladenosine-3'-phosphate
  modified_base 11: mod_base = OTHER; note = 2'-O-methyluridine-3'-phosphate
  modified_base 12: mod_base = OTHER; note = 2'-O-methyluridine-3'-phosphate
  modified_base 13: mod_base = OTHER; note = 2'-O-methylguanosine-3'-phosphate
  modified_base 14: mod_base = OTHER; note = 2'-deoxy-2'-fluoroguanosine-3'-phosphate
  modified_base 15: mod_base = OTHER; note = 2'-O-methylcytidine-3'-phosphate
  modified_base 16: mod_base = OTHER; note = 2'-deoxy-2'-fluorouridine-3'-phosphate
  modified_base 17: mod_base = OTHER; note = 2'-O-methyluridine-3'-phosphate
  modified_base 18: mod_base = OTHER; note = 2'-O-methyladenosine-3'-phosphate
  modified_base 19: mod_base = OTHER; note = 2'-O-methyladenosine-3'-phosphate
  modified_base 20: mod_base = OTHER; note = 2'-O-methyluridine-3'-phosphate
  modified_base 21: mod_base = OTHER; note = 2'-O-methylguanosine-3'-phosphorothioate
  modified_base 22: mod_base = OTHER; note = 2'-O-methyluridine-3'-phosphorothioate
  modified_base 23: mod_base = OTHER; note = 2'-O-methyladenosine
ttatacttaattggcttaatgta

SEQ ID NO: 293 - RNA, 21 nt, synthetic construct
  source 1..21: mol_type = other RNA
  modified_base 1: mod_base = OTHER; note = 2'-O-methyladenosine-3'-phosphorothioate
  modified_base 2: mod_base = OTHER; note = 2'-O-methyluridine-3'-phosphorothioate
  modified_base 3: mod_base = OTHER; note = 2'-O-methyluridine-3'-phosphate
  modified_base 4: mod_base = OTHER; note = 2'-O-methyladenosine-3'-phosphate
  modified_base 5: mod_base = OTHER; note = 2'-O-methyladenosine-3'-phosphate
  modified_base 6: mod_base = OTHER; note = 2'-O-methylguanosine-3'-phosphate
  modified_base 7: mod_base = OTHER; note = 2'-deoxy-2'-fluorocytidine-3'-phosphate
  modified_base 8: mod_base = OTHER; note = 2'-O-methylcytidine-3'-phosphate
  modified_base 9: mod_base = OTHER; note = 2'-deoxy-2'-fluoroadenosine-3'-phosphate
  modified_base 10: mod_base = OTHER; note = 2'-deoxy-2'-fluoroadenosine-3'-phosphate
  modified_base 11: mod_base = OTHER; note = 2'-deoxy-2'-fluorouridine-3'-phosphate
  modified_base 12: mod_base = OTHER; note = 2'-O-methyluridine-3'-phosphate
  modified_base 13: mod_base = OTHER; note = 2'-O-methyladenosine-3'-phosphate
  modified_base 14: mod_base = OTHER; note = 2'-O-methyladenosine-3'-phosphate
  modified_base 15: mod_base = OTHER; note = 2'-O-methylguanosine-3'-phosphate
  modified_base 16: mod_base = OTHER; note = 2'-O-methyluridine-3'-phosphate
  modified_base 17: mod_base = OTHER; note = 2'-O-methyladenosine-3'-phosphate
  modified_base 18: mod_base = OTHER; note = 2'-O-methyluridine-3'-phosphate
  modified_base 19: mod_base = OTHER; note = 2'-O-methyladenosine-3'-phosphate
  modified_base 20: mod_base = OTHER; note = 2'-O-methyladenosine-3'-phosphate
  modified_base 21: mod_base = OTHER; note = 2'-O-methyladenosine-3'-phosphate
attaagccaattaagtataaa

SEQ ID NO: 294 - RNA, 23 nt, synthetic construct
  source 1..23: mol_type = other RNA
  modified_base 1: mod_base = OTHER; note = 2'-O-methyluridine-3'-phosphorothioate
  modified_base 2: mod_base = OTHER; note = 2'-deoxy-2'-fluorouridine-3'-phosphorothioate
  modified_base 3: mod_base = OTHER; note = 2'-O-methyluridine-3'-phosphate
  modified_base 4: mod_base = OTHER; note = 2'-O-methyladenosine-3'-phosphate
  modified_base 5: mod_base = OTHER; note = 2'-O-methyluridine-3'-phosphate
  modified_base 6: mod_base = OTHER; note = 2'-deoxy-2'-fluoroadenosine-3'-phosphate
  modified_base 7: mod_base = OTHER; note = 2'-O-methylcytidine-3'-phosphate
  modified_base 8: mod_base = OTHER; note = 2'-deoxy-2'-fluorouridine-3'-phosphate
  modified_base 9: mod_base = OTHER; note = 2'-deoxy-2'-fluorouridine-3'-phosphate
  modified_base 10: mod_base = OTHER; note = 2'-O-methyladenosine-3'-phosphate
  modified_base 11: mod_base = OTHER; note = 2'-O-methyladenosine-3'-phosphate
  modified_base 12: mod_base = OTHER; note = 2'-O-methyluridine-3'-phosphate
  modified_base 13: mod_base = OTHER; note = 2'-O-methyluridine-3'-phosphate
  modified_base 14: mod_base = OTHER; note = 2'-deoxy-2'-fluoroguanosine-3'-phosphate
  modified_base 15: mod_base = OTHER; note = 2'-O-methylguanosine-3'-phosphate
  modified_base 16: mod_base = OTHER; note = 2'-deoxy-2'-fluorocytidine-3'-phosphate
  modified_base 17: mod_base = OTHER; note = 2'-O-methyluridine-3'-phosphate
  modified_base 18: mod_base = OTHER; note = 2'-O-methyluridine-3'-phosphate
  modified_base 19: mod_base = OTHER; note = 2'-O-methyladenosine-3'-phosphate
  modified_base 20: mod_base = OTHER; note = 2'-O-methyladenosine-3'-phosphate
  modified_base 21: mod_base = OTHER; note = 2'-O-methyluridine-3'-phosphorothioate
  modified_base 22: mod_base = OTHER; note = 2'-O-methylguanosine-3'-phosphorothioate
  modified_base 23: mod_base = OTHER; note = 2'-O-methyluridine
tttatacttaattggcttaatgt

SEQ ID NO: 295 - RNA, 21 nt, synthetic construct
  source 1..21: mol_type = other RNA
  modified_base 1: mod_base = OTHER; note = 2'-O-methyluridine-3'-phosphorothioate
  modified_base 2: mod_base = OTHER; note = 2'-O-methyluridine-3'-phosphorothioate
  modified_base 3: mod_base = OTHER; note = 2'-O-methyladenosine-3'-phosphate
  modified_base 4: mod_base = OTHER; note = 2'-O-methyladenosine-3'-phosphate
  modified_base 5: mod_base = OTHER; note = 2'-O-methylguanosine-3'-phosphate
  modified_base 6: mod_base = OTHER; note = 2'-O-methylcytidine-3'-phosphate
  modified_base 7: mod_base = OTHER; note = 2'-deoxy-2'-fluorocytidine-3'-phosphate
  modified_base 8: mod_base = OTHER; note = 2'-O-methyladenosine-3'-phosphate
  modified_base 9: mod_base = OTHER; note = 2'-deoxy-2'-fluoroadenosine-3'-phosphate
  modified_base 10: mod_base = OTHER; note = 2'-deoxy-2'-fluorouridine-3'-phosphate
  modified_base 11: mod_base = OTHER; note = 2'-deoxy-2'-fluorouridine-3'-phosphate
  modified_base 12: mod_base = OTHER; note = 2'-O-methyladenosine-3'-phosphate
  modified_base 13: mod_base = OTHER; note = 2'-O-methyladenosine-3'-phosphate
  modified_base 14: mod_base = OTHER; note = 2'-O-methylguanosine-3'-phosphate
  modified_base 15: mod_base = OTHER; note = 2'-O-methyluridine-3'-phosphate
  modified_base 16: mod_base = OTHER; note = 2'-O-methyladenosine-3'-phosphate
  modified_base 17: mod_base = OTHER; note = 2'-O-methyluridine-3'-phosphate
  modified_base 18: mod_base = OTHER; note = 2'-O-methyladenosine-3'-phosphate
  modified_base 19: mod_base = OTHER; note = 2'-O-methyladenosine-3'-phosphate
  modified_base 20: mod_base = OTHER; note = 2'-O-methyladenosine-3'-phosphate
  modified_base 21: mod_base = OTHER; note = 2'-O-methyladenosine-3'-phosphate
ttaagccaattaagtataaaa

SEQ ID NO: 296 - RNA, 23 nt, synthetic construct
  source 1..23: mol_type = other RNA
  modified_base 1: mod_base = OTHER; note = 2'-O-methyluridine-3'-phosphorothioate
  modified_base 2: mod_base = OTHER; note = 2'-deoxy-2'-fluorouridine-3'-phosphorothioate
  modified_base 3: mod_base = OTHER; note = 2'-O-methyluridine-3'-phosphate
  modified_base 4: mod_base = OTHER; note = 2'-O-methyluridine-3'-phosphate
  modified_base 5: mod_base = OTHER; note = 2'-O-methyladenosine-3'-phosphate
  modified_base 6: mod_base = OTHER; note = 2'-deoxy-2'-fluorouridine-3'-phosphate
  modified_base 7: mod_base = OTHER; note = 2'-O-methyladenosine-3'-phosphate
  modified_base 8: mod_base = OTHER; note = 2'-deoxy-2'-fluorocytidine-3'-phosphate
  modified_base 9: mod_base = OTHER; note = 2'-deoxy-2'-fluorouridine-3'-phosphate
  modified_base 10: mod_base = OTHER; note = 2'-O-methyluridine-3'-phosphate
  modified_base 11: mod_base = OTHER; note = 2'-O-methyladenosine-3'-phosphate
  modified_base 12: mod_base = OTHER; note = 2'-O-methyladenosine-3'-phosphate
  modified_base 13: mod_base = OTHER; note = 2'-O-methyluridine-3'-phosphate
  modified_base 14: mod_base = OTHER; note = 2'-deoxy-2'-fluorouridine-3'-phosphate
  modified_base 15: mod_base = OTHER; note = 2'-O-methylguanosine-3'-phosphate
  modified_base 16: mod_base = OTHER; note = 2'-deoxy-2'-fluoroguanosine-3'-phosphate
  modified_base 17: mod_base = OTHER; note = 2'-O-methylcytidine-3'-phosphate
  modified_base 18: mod_base = OTHER; note = 2'-O-methyluridine-3'-phosphate
  modified_base 19: mod_base = OTHER; note = 2'-O-methyluridine-3'-phosphate
  modified_base 20: mod_base = OTHER; note = 2'-O-methyladenosine-3'-phosphate
  modified_base 21: mod_base = OTHER; note = 2'-O-methyladenosine-3'-phosphorothioate
  modified_base 22: mod_base = OTHER; note = 2'-O-methyluridine-3'-phosphorothioate
  modified_base 23: mod_base = OTHER; note = 2'-O-methylguanosine
ttttatacttaattggcttaatg

SEQ ID NO: 297 - RNA, 21 nt, synthetic construct
  source 1..21: mol_type = other RNA
  modified_base 1: mod_base = OTHER; note = 2'-O-methyluridine-3'-phosphorothioate
  modified_base 2: mod_base = OTHER; note = 2'-O-methyladenosine-3'-phosphorothioate
  modified_base 3: mod_base = OTHER; note = 2'-O-methyladenosine-3'-phosphate
  modified_base 4: mod_base = OTHER; note = 2'-O-methylguanosine-3'-phosphate
  modified_base 5: mod_base = OTHER; note = 2'-O-methylcytidine-3'-phosphate
  modified_base 6: mod_base = OTHER; note = 2'-O-methylcytidine-3'-phosphate
  modified_base 7: mod_base = OTHER; note = 2'-deoxy-2'-fluoroadenosine-3'-phosphate
  modified_base 8: mod_base = OTHER; note = 2'-O-methyladenosine-3'-phosphate
  modified_base 9: mod_base = OTHER; note = 2'-deoxy-2'-fluorouridine-3'-phosphate
  modified_base 10: mod_base = OTHER; note = 2'-deoxy-2'-fluorouridine-3'-phosphate
  modified_base 11: mod_base = OTHER; note = 2'-deoxy-2'-fluoroadenosine-3'-phosphate
  modified_base 12: mod_base = OTHER; note = 2'-O-methyladenosine-3'-phosphate
  modified_base 13: mod_base = OTHER; note = 2'-O-methylguanosine-3'-phosphate
  modified_base 14: mod_base = OTHER; note = 2'-O-methyluridine-3'-phosphate
  modified_base 15: mod_base = OTHER; note = 2'-O-methyladenosine-3'-phosphate
  modified_base 16: mod_base = OTHER; note = 2'-O-methyluridine-3'-phosphate
  modified_base 17: mod_base = OTHER; note = 2'-O-methyladenosine-3'-phosphate
  modified_base 18: mod_base = OTHER; note = 2'-O-methyladenosine-3'-phosphate
  modified_base 19: mod_base = OTHER; note = 2'-O-methyladenosine-3'-phosphate
  modified_base 20: mod_base = OTHER; note = 2'-O-methylguanosine-3'-phosphate
  modified_base 21: mod_base = OTHER; note = 2'-O-methyladenosine-3'-phosphate
taagccaattaagtataaaga

SEQ ID NO: 298 - RNA, 23 nt, synthetic construct
  source 1..23: mol_type = other RNA
  modified_base 1: mod_base = OTHER; note = 2'-O-methyluridine-3'-phosphorothioate
  modified_base 2: mod_base = OTHER; note = 2'-deoxy-2'-fluorocytidine-3'-phosphorothioate
  modified_base 3: mod_base = OTHER; note = 2'-O-methyluridine-3'-phosphate
  modified_base 4: mod_base = OTHER; note = 2'-O-methyluridine-3'-phosphate
  modified_base 5: mod_base = OTHER; note = 2'-O-methyluridine-3'-phosphate
  modified_base 6: mod_base = OTHER; note = 2'-deoxy-2'-fluoroadenosine-3'-phosphate
  modified_base 7: mod_base = OTHER; note = 2'-O-methyluridine-3'-phosphate
  modified_base 8: mod_base = OTHER; note = 2'-deoxy-2'-fluoroadenosine-3'-phosphate
  modified_base 9: mod_base = OTHER; note = 2'-deoxy-2'-fluorocytidine-3'-phosphate
  modified_base 10: mod_base = OTHER; note = 2'-O-methyluridine-3'-phosphate
  modified_base 11: mod_base = OTHER; note = 2'-O-methyluridine-3'-phosphate
  modified_base 12: mod_base = OTHER; note = 2'-O-methyladenosine-3'-phosphate
  modified_base 13: mod_base = OTHER; note = 2'-O-methyladenosine-3'-phosphate
  modified_base 14: mod_base = OTHER; note = 2'-deoxy-2'-fluorouridine-3'-phosphate
  modified_base 15: mod_base = OTHER; note = 2'-O-methyluridine-3'-phosphate
  modified_base 16: mod_base = OTHER; note = 2'-deoxy-2'-fluoroguanosine-3'-phosphate
  modified_base 17: mod_base = OTHER; note = 2'-O-methylguanosine-3'-phosphate
  modified_base 18: mod_base = OTHER; note = 2'-O-methylcytidine-3'-phosphate
  modified_base 19: mod_base = OTHER; note = 2'-O-methyluridine-3'-phosphate
  modified_base 20: mod_base = OTHER; note = 2'-O-methyluridine-3'-phosphate
  modified_base 21: mod_base = OTHER; note = 2'-O-methyladenosine-3'-phosphorothioate
  modified_base 22: mod_base = OTHER; note = 2'-O-methyladenosine-3'-phosphorothioate
  modified_base 23: mod_base = OTHER; note = 2'-O-methyluridine
tctttatacttaattggcttaat

SEQ ID NO: 299 - RNA, 21 nt, synthetic construct
  source 1..21: mol_type = other RNA
  modified_base 1: mod_base = OTHER; note = 2'-O-methyladenosine-3'-phosphorothioate
  modified_base 2: mod_base = OTHER; note = 2'-O-methyladenosine-3'-phosphorothioate
  modified_base 3: mod_base = OTHER; note = 2'-O-methylguanosine-3'-phosphate
  modified_base 4: mod_base = OTHER; note = 2'-O-methylcytidine-3'-phosphate
  modified_base 5: mod_base = OTHER; note = 2'-O-methylcytidine-3'-phosphate
  modified_base 6: mod_base = OTHER; note = 2'-O-methyladenosine-3'-phosphate
  modified_base 7: mod_base = OTHER; note = 2'-deoxy-2'-fluoroadenosine-3'-phosphate
  modified_base 8: mod_base = OTHER; note = 2'-O-methyluridine-3'-phosphate
  modified_base 9: mod_base = OTHER; note = 2'-deoxy-2'-fluorouridine-3'-phosphate
  modified_base 10: mod_base = OTHER; note = 2'-deoxy-2'-fluoroadenosine-3'-phosphate
  modified_base 11: mod_base = OTHER; note = 2'-deoxy-2'-fluoroadenosine-3'-phosphate
  modified_base 12: mod_base = OTHER; note = 2'-O-methylguanosine-3'-phosphate
  modified_base 13: mod_base = OTHER; note = 2'-O-methyluridine-3'-phosphate
  modified_base 14: mod_base = OTHER; note = 2'-O-methyladenosine-3'-phosphate
  modified_base 15: mod_base = OTHER; note = 2'-O-methyluridine-3'-phosphate
  modified_base 16: mod_base = OTHER; note = 2'-O-methyladenosine-3'-phosphate
  modified_base 17: mod_base = OTHER; note = 2'-O-methyladenosine-3'-phosphate
  modified_base 18: mod_base = OTHER; note = 2'-O-methyladenosine-3'-phosphate
  modified_base 19: mod_base = OTHER; note = 2'-O-methylguanosine-3'-phosphate
  modified_base 20: mod_base = OTHER; note = 2'-O-methylguanosine-3'-phosphate
  modified_base 21: mod_base = OTHER; note = 2'-O-methyladenosine-3'-phosphate
aagccaattaagtataaagga

SEQ ID NO: 300 - RNA, 23 nt, synthetic construct
  source 1..23: mol_type = other RNA
  modified_base 1: mod_base = OTHER; note = 2'-O-methyluridine-3'-phosphorothioate
  modified_base 2: mod_base = OTHER; note = 2'-deoxy-2'-fluorocytidine-3'-phosphorothioate
  modified_base 3: mod_base = OTHER; note = 2'-O-methylcytidine-3'-phosphate
  modified_base 4: mod_base = OTHER; note = 2'-O-methyluridine-3'-phosphate
  modified_base 5: mod_base = OTHER; note = 2'-O-methyluridine-3'-phosphate
  modified_base 6: mod_base = OTHER; note = 2'-deoxy-2'-fluorouridine-3'-phosphate
  modified_base 7: mod_base = OTHER; note = 2'-O-methyladenosine-3'-phosphate
  modified_base 8: mod_base = OTHER; note = 2'-deoxy-2'-fluorouridine-3'-phosphate
  modified_base 9: mod_base = OTHER; note = 2'-deoxy-2'-fluoroadenosine-3'-phosphate
  modified_base 10: mod_base = OTHER; note = 2'-O-methylcytidine-3'-phosphate
  modified_base 11: mod_base = OTHER; note = 2'-O-methyluridine-3'-phosphate
  modified_base 12: mod_base = OTHER; note = 2'-O-methyluridine-3'-phosphate
  modified_base 13: mod_base = OTHER; note = 2'-O-methyladenosine-3'-phosphate
  modified_base 14: mod_base = OTHER; note = 2'-deoxy-2'-fluoroadenosine-3'-phosphate
  modified_base 15: mod_base = OTHER; note = 2'-O-methyluridine-3'-phosphate
  modified_base 16: mod_base = OTHER; note = 2'-deoxy-2'-fluorouridine-3'-phosphate
  modified_base 17: mod_base = OTHER; note = 2'-O-methylguanosine-3'-phosphate
  modified_base 18: mod_base = OTHER; note = 2'-O-methylguanosine-3'-phosphate
  modified_base 19: mod_base = OTHER; note = 2'-O-methylcytidine-3'-phosphate
  modified_base 20: mod_base = OTHER; note = 2'-O-methyluridine-3'-phosphate
  modified_base 21: mod_base = OTHER; note = 2'-O-methyluridine-3'-phosphorothioate
  modified_base 22: mod_base = OTHER; note = 2'-O-methyladenosine-3'-phosphorothioate
  modified_base 23: mod_base = OTHER; note = 2'-O-methyladenosine
tcctttatacttaattggcttaa

SEQ ID NO: 301 - RNA, 21 nt, synthetic construct
  source 1..21: mol_type = other RNA
  modified_base 1: mod_base = OTHER; note = 2'-O-methyladenosine-3'-phosphorothioate
  modified_base 2: mod_base = OTHER; note = 2'-O-methylguanosine-3'-phosphorothioate
  modified_base 3: mod_base = OTHER; note = 2'-O-methylcytidine-3'-phosphate
  modified_base 4: mod_base = OTHER; note = 2'-O-methylcytidine-3'-phosphate
  modified_base 5: mod_base = OTHER; note = 2'-O-methyladenosine-3'-phosphate
  modified_base 6: mod_base = OTHER; note = 2'-O-methyladenosine-3'-phosphate
  modified_base 7: mod_base = OTHER; note = 2'-deoxy-2'-fluorouridine-3'-phosphate
  modified_base 8: mod_base = OTHER; note = 2'-O-methyluridine-3'-phosphate
  modified_base 9: mod_base = OTHER; note = 2'-deoxy-2'-fluoroadenosine-3'-phosphate
  modified_base 10: mod_base = OTHER; note = 2'-deoxy-2'-fluoroadenosine-3'-phosphate
  modified_base 11: mod_base = OTHER; note = 2'-deoxy-2'-fluoroguanosine-3'-phosphate
  modified_base 12: mod_base = OTHER; note = 2'-O-methyluridine-3'-phosphate
  modified_base 13: mod_base = OTHER; note = 2'-O-methyladenosine-3'-phosphate
  modified_base 14: mod_base = OTHER; note = 2'-O-methyluridine-3'-phosphate
  modified_base 15: mod_base = OTHER; note = 2'-O-methyladenosine-3'-phosphate
  modified_base 16: mod_base = OTHER; note = 2'-O-methyladenosine-3'-phosphate
  modified_base 17: mod_base = OTHER; note = 2'-O-methyladenosine-3'-phosphate
  modified_base 18: mod_base = OTHER; note = 2'-O-methylguanosine-3'-phosphate
  modified_base 19: mod_base = OTHER; note = 2'-O-methylguanosine-3'-phosphate
  modified_base 20: mod_base = OTHER; note = 2'-O-methyluridine-3'-phosphate
  modified_base 21: mod_base = OTHER; note = 2'-O-methyladenosine-3'-phosphate
agccaattaagtataaaggta

SEQ ID NO: 302 - RNA, 23 nt, synthetic construct
  source 1..23: mol_type = other RNA
  modified_base 1: mod_base = OTHER; note = 2'-O-methyluridine-3'-phosphorothioate
  modified_base 2: mod_base = OTHER; note = 2'-deoxy-2'-fluoroadenosine-3'-phosphorothioate
  modified_base 3: mod_base = OTHER; note = 2'-O-methylcytidine-3'-phosphate
  modified_base 4: mod_base = OTHER; note = 2'-O-methylcytidine-3'-phosphate
  modified_base 5: mod_base = OTHER; note = 2'-O-methyluridine-3'-phosphate
  modified_base 6: mod_base = OTHER; note = 2'-deoxy-2'-fluorouridine-3'-phosphate
  modified_base 7: mod_base = OTHER; note = 2'-O-methyluridine-3'-phosphate
  modified_base 8: mod_base = OTHER; note = 2'-deoxy-2'-fluoroadenosine-3'-phosphate
  modified_base 9: mod_base = OTHER; note = 2'-deoxy-2'-fluorouridine-3'-phosphate
  modified_base 10: mod_base = OTHER; note = 2'-O-methyladenosine-3'-phosphate
  modified_base 11: mod_base = OTHER; note = 2'-O-methylcytidine-3'-phosphate
  modified_base 12: mod_base = OTHER; note = 2'-O-methyluridine-3'-phosphate
  modified_base 13: mod_base = OTHER; note = 2'-O-methyluridine-3'-phosphate
  modified_base 14: mod_base = OTHER; note = 2'-deoxy-2'-fluoroadenosine-3'-phosphate
  modified_base 15: mod_base = OTHER; note = 2'-O-methyladenosine-3'-phosphate
  modified_base 16: mod_base = OTHER; note = 2'-deoxy-2'-fluorouridine-3'-phosphate
  modified_base 17: mod_base = OTHER; note = 2'-O-methyluridine-3'-phosphate
  modified_base 18: mod_base = OTHER; note = 2'-O-methylguanosine-3'-phosphate
  modified_base 19: mod_base = OTHER; note = 2'-O-methylguanosine-3'-phosphate
  modified_base 20: mod_base = OTHER; note = 2'-O-methylcytidine-3'-phosphate
  modified_base 21: mod_base = OTHER; note = 2'-O-methyluridine-3'-phosphorothioate
  modified_base 22: mod_base = OTHER; note = 2'-O-methyluridine-3'-phosphorothioate
  modified_base 23: mod_base = OTHER; note = 2'-O-methyladenosine
tacctttatacttaattggctta

SEQ ID NO: 303 - RNA, 21 nt, synthetic construct
  source 1..21: mol_type = other RNA
  modified_base 1: mod_base = OTHER; note = 2'-O-methyladenosine-3'-phosphorothioate
  modified_base 2: mod_base = OTHER; note = 2'-O-methylcytidine-3'-phosphorothioate
  modified_base 3: mod_base = OTHER; note = 2'-O-methyluridine-3'-phosphate
  modified_base 4: mod_base = OTHER; note = 2'-O-methyluridine-3'-phosphate
  modified_base 5: mod_base = OTHER; note = 2'-O-methylguanosine-3'-phosphate
  modified_base 6: mod_base = OTHER; note = 2'-O-methylguanosine-3'-phosphate
  modified_base 7: mod_base = OTHER; note = 2'-deoxy-2'-fluoroadenosine-3'-phosphate
  modified_base 8: mod_base = OTHER; note = 2'-O-methyladenosine-3'-phosphate
  modified_base 9: mod_base = OTHER; note = 2'-deoxy-2'-fluorocytidine-3'-phosphate
  modified_base 10: mod_base = OTHER; note = 2'-deoxy-2'-fluorouridine-3'-phosphate
  modified_base 11: mod_base = OTHER; note = 2'-deoxy-2'-fluorocytidine-3'-phosphate
  modified_base 12: mod_base = OTHER; note = 2'-O-methyluridine-3'-phosphate
  modified_base 13: mod_base = OTHER; note = 2'-O-methyladenosine-3'-phosphate
  modified_base 14: mod_base = OTHER; note = 2'-O-methyluridine-3'-phosphate
  modified_base 15: mod_base = OTHER; note = 2'-O-methyluridine-3'-phosphate
  modified_base 16: mod_base = OTHER; note = 2'-O-methylguanosine-3'-phosphate
  modified_base 17: mod_base = OTHER; note = 2'-O-methylcytidine-3'-phosphate
  modified_base 18: mod_base = OTHER; note = 2'-O-methylcytidine-3'-phosphate
  modified_base 19: mod_base = OTHER; note = 2'-O-methylcytidine-3'-phosphate
  modified_base 20: mod_base = OTHER; note = 2'-O-methyluridine-3'-phosphate
  modified_base 21: mod_base = OTHER; note = 2'-O-methyladenosine-3'-phosphate
acttggaactctattgcccta

SEQ ID NO: 304 - RNA, 23 nt, synthetic construct
  source 1..23: mol_type = other RNA
  modified_base 1: mod_base = OTHER; note = 2'-O-methyluridine-3'-phosphorothioate
  modified_base 2: mod_base = OTHER; note = 2'-deoxy-2'-fluoroadenosine-3'-phosphorothioate
  modified_base 3: mod_base = OTHER; note = 2'-O-methylguanosine-3'-phosphate
  modified_base 4: mod_base = OTHER; note = 2'-O-methylguanosine-3'-phosphate
  modified_base 5: mod_base = OTHER; note = 2'-O-methylguanosine-3'-phosphate
  modified_base 6: mod_base = OTHER; note = 2'-deoxy-2'-fluorocytidine-3'-phosphate
  modified_base 7: mod_base = OTHER; note = 2'-O-methyladenosine-3'-phosphate
  modified_base 8: mod_base = OTHER; note = 2'-deoxy-2'-fluoroadenosine-3'-phosphate
  modified_base 9: mod_base = OTHER; note = 2'-deoxy-2'-fluorouridine-3'-phosphate
  modified_base 10: mod_base = OTHER; note = 2'-O-methyladenosine-3'-phosphate
  modified_base 11: mod_base = OTHER; note = 2'-O-methylguanosine-3'-phosphate
  modified_base 12: mod_base = OTHER; note = 2'-O-methyladenosine-3'-phosphate
  modified_base 13: mod_base = OTHER; note = 2'-O-methylguanosine-3'-phosphate
  modified_base 14: mod_base = OTHER; note = 2'-deoxy-2'-fluorouridine-3'-phosphate
  modified_base 15: mod_base = OTHER; note = 2'-O-methyluridine-3'-phosphate
  modified_base 16: mod_base = OTHER; note = 2'-deoxy-2'-fluorocytidine-3'-phosphate
  modified_base 17: mod_base = OTHER; note = 2'-O-methylcytidine-3'-phosphate
  modified_base 18: mod_base = OTHER; note = 2'-O-methyladenosine-3'-phosphate
  modified_base 19: mod_base = OTHER; note = 2'-O-methyladenosine-3'-phosphate
  modified_base 20: mod_base = OTHER; note = 2'-O-methylguanosine-3'-phosphate
  modified_base 21: mod_base = OTHER; note = 2'-O-methyluridine-3'-phosphorothioate
  modified_base 22: mod_base = OTHER; note = 2'-O-methyluridine-3'-phosphorothioate
  modified_base 23: mod_base = OTHER; note = 2'-O-methyluridine
tagggcaatagagttccaagttt

SEQ ID NO: 305 - RNA, 21 nt, synthetic construct
  source 1..21: mol_type = other RNA
  modified_base 1: mod_base = OTHER; note = 2'-O-methyluridine-3'-phosphorothioate
  modified_base 2: mod_base = OTHER; note = 2'-O-methyluridine-3'-phosphorothioate
  modified_base 3: mod_base = OTHER; note = 2'-O-methylguanosine-3'-phosphate
  modified_base 4: mod_base = OTHER; note = 2'-O-methylguanosine-3'-phosphate
  modified_base 5: mod_base = OTHER; note = 2'-O-methyladenosine-3'-phosphate
  modified_base 6: mod_base = OTHER; note = 2'-O-methyladenosine-3'-phosphate
  modified_base 7: mod_base = OTHER; note = 2'-deoxy-2'-fluorocytidine-3'-phosphate
  modified_base 8: mod_base = OTHER; note = 2'-O-methyluridine-3'-phosphate
  modified_base 9: mod_base = OTHER; note = 2'-deoxy-2'-fluorocytidine-3'-phosphate
  modified_base 10: mod_base = OTHER; note = 2'-deoxy-2'-fluorouridine-3'-phosphate
  modified_base 11: mod_base = OTHER; note = 2'-deoxy-2'-fluoroadenosine-3'-phosphate
  modified_base 12: mod_base = OTHER; note = 2'-O-methyluridine-3'-phosphate
  modified_base 13: mod_base = OTHER; note = 2'-O-methyluridine-3'-phosphate
  modified_base 14: mod_base = OTHER; note = 2'-O-methylguanosine-3'-phosphate
  modified_base 15: mod_base = OTHER; note = 2'-O-methylcytidine-3'-phosphate
  modified_base 16: mod_base = OTHER; note = 2'-O-methylcytidine-3'-phosphate
  modified_base 17: mod_base = OTHER; note = 2'-O-methylcytidine-3'-phosphate
  modified_base 18: mod_base = OTHER; note = 2'-O-methyluridine-3'-phosphate
  modified_base 19: mod_base = OTHER; note = 2'-O-methyluridine-3'-phosphate
  modified_base 20: mod_base = OTHER; note = 2'-O-methylguanosine-3'-phosphate
  modified_base 21: mod_base = OTHER; note = 2'-O-methyladenosine-3'-phosphate
ttggaactctattgcccttga

SEQ ID NO: 306 - RNA, 23 nt, synthetic construct
  source 1..23: mol_type = other RNA
  modified_base 1: mod_base = OTHER; note = 2'-O-methyluridine-3'-phosphorothioate
  modified_base 2: mod_base = OTHER; note = 2'-deoxy-2'-fluorocytidine-3'-phosphorothioate
  modified_base 3: mod_base = OTHER; note = 2'-O-methyladenosine-3'-phosphate
  modified_base 4: mod_base = OTHER; note = 2'-O-methyladenosine-3'-phosphate
  modified_base 5: mod_base = OTHER; note = 2'-O-methylguanosine-3'-phosphate
  modified_base 6: mod_base = OTHER; note = 2'-deoxy-2'-fluoroguanosine-3'-phosphate
  modified_base 7: mod_base = OTHER; note = 2'-O-methylguanosine-3'-phosphate
  modified_base 8: mod_base = OTHER; note = 2'-deoxy-2'-fluorocytidine-3'-phosphate
  modified_base 9: mod_base = OTHER; note = 2'-deoxy-2'-fluoroadenosine-3'-phosphate
  modified_base 10: mod_base = OTHER; note = 2'-O-methyladenosine-3'-phosphate
  modified_base 11: mod_base = OTHER; note = 2'-O-methyluridine-3'-phosphate
  modified_base 12: mod_base = OTHER; note = 2'-O-methyladenosine-3'-phosphate
  modified_base 13: mod_base = OTHER; note = 2'-O-methylguanosine-3'-phosphate
  modified_base 14: mod_base = OTHER; note = 2'-deoxy-2'-fluoroadenosine-3'-phosphate
  modified_base 15: mod_base = OTHER; note = 2'-O-methylguanosine-3'-phosphate
  modified_base 16: mod_base = OTHER; note = 2'-deoxy-2'-fluorouridine-3'-phosphate
  modified_base 17: mod_base = OTHER; note = 2'-O-methyluridine-3'-phosphate
  modified_base 18: mod_base = OTHER; note = 2'-O-methylcytidine-3'-phosphate
  modified_base 19: mod_base = OTHER; note = 2'-O-methylcytidine-3'-phosphate
  modified_base 20: mod_base = OTHER; note = 2'-O-methyladenosine-3'-phosphate
  modified_base 21: mod_base = OTHER; note = 2'-O-methyladenosine-3'-phosphorothioate
  modified_base 22: mod_base = OTHER; note = 2'-O-methylguanosine-3'-phosphorothioate
  modified_base 23: mod_base = OTHER; note = 2'-O-methyluridine
tcaagggcaatagagttccaagt

SEQ ID NO: 307 - RNA, 21 nt, synthetic construct
  source 1..21: mol_type = other RNA
  modified_base 1: mod_base = OTHER; note = 2'-O-methylguanosine-3'-phosphorothioate
  modified_base 2: mod_base = OTHER; note = 2'-O-methylcytidine-3'-phosphorothioate
  modified_base 3: mod_base = OTHER; note = 2'-O-methylcytidine-3'-phosphate
  modified_base 4: mod_base = OTHER; note = 2'-O-methylcytidine-3'-phosphate
  modified_base 5: mod_base = OTHER; note = 2'-O-methyluridine-3'-phosphate
  modified_base 6: mod_base = OTHER; note = 2'-O-methyluridine-3'-phosphate
  modified_base 7: mod_base = OTHER; note = 2'-deoxy-2'-fluoroguanosine-3'-phosphate
  modified_base 8: mod_base = OTHER; note = 2'-O-methylcytidine-3'-phosphate
  modified_base 9: mod_base = OTHER; note = 2'-deoxy-2'-fluoroadenosine-3'-phosphate
  modified_base 10: mod_base = OTHER; note = 2'-deoxy-2'-fluoroguanosine-3'-phosphate
  modified_base 11: mod_base = OTHER; note = 2'-deoxy-2'-fluoroadenosine-3'-phosphate
  modified_base 12: mod_base = OTHER; note = 2'-O-methyladenosine-3'-phosphate
  modified_base 13: mod_base = OTHER; note = 2'-O-methyladenosine-3'-phosphate
  modified_base 14: mod_base = OTHER; note = 2'-O-methylguanosine-3'-phosphate
  modified_base 15: mod_base = OTHER; note = 2'-O-methyluridine-3'-phosphate
  modified_base 16: mod_base = OTHER; note = 2'-O-methyluridine-3'-phosphate
  modified_base 17: mod_base = OTHER; note = 2'-O-methyluridine-3'-phosphate
  modified_base 18: mod_base = OTHER; note = 2'-O-methyladenosine-3'-phosphate
  modified_base 19: mod_base = OTHER; note = 2'-O-methyluridine-3'-phosphate
  modified_base 20: mod_base = OTHER; note = 2'-O-methylcytidine-3'-phosphate
  modified_base 21: mod_base = OTHER; note = 2'-O-methyladenosine-3'-phosphate
gcccttgcagaaagtttatca

SEQ ID NO: 308 - RNA, 23 nt, synthetic construct
  source 1..23: mol_type = other RNA
  modified_base 1: mod_base = OTHER; note = 2'-O-methyluridine-3'-phosphorothioate
  modified_base 2: mod_base = OTHER; note = 2'-deoxy-2'-fluoroguanosine-3'-phosphorothioate
  modified_base 3: mod_base = OTHER; note = 2'-O-methyladenosine-3'-phosphate
  modified_base 4: mod_base = OTHER; note = 2'-O-methyluridine-3'-phosphate
  modified_base 5: mod_base = OTHER; note = 2'-O-methyladenosine-3'-phosphate
  modified_base 6: mod_base = OTHER; note = 2'-deoxy-2'-fluoroadenosine-3'-phosphate
  modified_base 7: mod_base = OTHER; note = 2'-O-methyladenosine-3'-phosphate
  modified_base 8: mod_base = OTHER; note = 2'-deoxy-2'-fluorocytidine-3'-phosphate
  modified_base 9: mod_base = OTHER; note = 2'-deoxy-2'-fluorouridine-3'-phosphate
  modified_base 10: mod_base = OTHER; note = 2'-O-methyluridine-3'-phosphate
  modified_base 11: mod_base = OTHER; note = 2'-O-methyluridine-3'-phosphate
  modified_base 12: mod_base = OTHER; note = 2'-O-methylcytidine-3'-phosphate
  modified_base 13: mod_base = OTHER; note = 2'-O-methyluridine-3'-phosphate
  modified_base 14: mod_base = OTHER; note = 2'-deoxy-2'-fluoroguanosine-3'-phosphate
  modified_base 15: mod_base = OTHER; note = 2'-O-methylcytidine-3'-phosphate
  modified_base 16: mod_base = OTHER; note = 2'-deoxy-2'-fluoroadenosine-3'-phosphate
  modified_base 17: mod_base = OTHER; note = 2'-O-methyladenosine-3'-phosphate
  modified_base 18: mod_base = OTHER; note = 2'-O-methylguanosine-3'-phosphate
  modified_base 19: mod_base = OTHER; note = 2'-O-methylguanosine-3'-phosphate
  modified_base 20: mod_base = OTHER; note = 2'-O-methylguanosine-3'-phosphate
  modified_base 21: mod_base = OTHER; note = 2'-O-methylcytidine-3'-phosphorothioate
  modified_base 22: mod_base = OTHER; note = 2'-O-methyladenosine-3'-phosphorothioate
  modified_base 23: mod_base = OTHER; note = 2'-O-methyladenosine
tgataaactttctgcaagggcaa

SEQ ID NO: 309 - RNA, 21 nt, synthetic construct
  source 1..21: mol_type = other RNA
  modified_base 1: mod_base = OTHER; note = 2'-O-methyluridine-3'-phosphorothioate
  modified_base 2: mod_base = OTHER; note = 2'-O-methylcytidine-3'-phosphorothioate
  modified_base 3: mod_base = OTHER; note = 2'-O-methylguanosine-3'-phosphate
  modified_base 4: mod_base = OTHER; note = 2'-O-methylcytidine-3'-phosphate
  modified_base 5: mod_base = OTHER; note = 2'-O-methyladenosine-3'-phosphate
  modified_base 6: mod_base = OTHER; note = 2'-O-methyluridine-3'-phosphate
  modified_base 7: mod_base = OTHER; note = 2'-deoxy-2'-fluoroguanosine-3'-phosphate
  modified_base 8: mod_base = OTHER; note = 2'-O-methyluridine-3'-phosphate
  modified_base 9: mod_base = OTHER; note = 2'-deoxy-2'-fluoroguanosine-3'-phosphate
  modified_base 10: mod_base = OTHER; note = 2'-deoxy-2'-fluorocytidine-3'-phosphate
  modified_base 11: mod_base = OTHER; note = 2'-deoxy-2'-fluoroadenosine-3'-phosphate
  modified_base 12: mod_base = OTHER; note = 2'-O-methylcytidine-3'-phosphate
  modified_base 13: mod_base = OTHER; note = 2'-O-methyladenosine-3'-phosphate
  modified_base 14: mod_base = OTHER; note = 2'-O-methyluridine-3'-phosphate
  modified_base 15: mod_base = OTHER; note = 2'-O-methyluridine-3'-phosphate
  modified_base 16: mod_base = OTHER; note = 2'-O-methylguanosine-3'-phosphate
  modified_base 17: mod_base = OTHER; note = 2'-O-methyladenosine-3'-phosphate
  modified_base 18: mod_base = OTHER; note = 2'-O-methyladenosine-3'-phosphate
  modified_base 19: mod_base = OTHER; note = 2'-O-methyladenosine-3'-phosphate
  modified_base 20: mod_base = OTHER; note = 2'-O-methyladenosine-3'-phosphate
  modified_base 21: mod_base = OTHER; note = 2'-O-methyladenosine-3'-phosphate
tcgcatgtgcacattgaaaaa

SEQ ID NO: 310 - RNA, 23 nt, synthetic construct
  source 1..23: mol_type = other RNA
  modified_base 1: mod_base = OTHER; note = 2'-O-methyluridine-3'-phosphorothioate
  modified_base 2: mod_base = OTHER; note = 2'-deoxy-2'-fluorouridine-3'-phosphorothioate
  modified_base 3: mod_base = OTHER; note = 2'-O-methyluridine-3'-phosphate
  modified_base 4: mod_base = OTHER; note = 2'-O-methyluridine-3'-phosphate
  modified_base 5: mod_base = OTHER; note = 2'-O-methyluridine-3'-phosphate
  modified_base 6: mod_base = OTHER; note = 2'-deoxy-2'-fluorocytidine-3'-phosphate
  modified_base 7: mod_base = OTHER; note = 2'-O-methyladenosine-3'-phosphate
  modified_base 8: mod_base = OTHER; note = 2'-deoxy-2'-fluoroadenosine-3'-phosphate
  modified_base 9: mod_base = OTHER; note = 2'-deoxy-2'-fluorouridine-3'-phosphate
  modified_base 10: mod_base = OTHER; note = 2'-O-methylguanosine-3'-phosphate
  modified_base 11: mod_base = OTHER; note = 2'-O-methyluridine-3'-phosphate
  modified_base 12: mod_base = OTHER; note = 2'-O-methylguanosine-3'-phosphate
  modified_base 13: mod_base = OTHER; note = 2'-O-methylcytidine-3'-phosphate
  modified_base 14: mod_base = OTHER; note = 2'-deoxy-2'-fluoroadenosine-3'-phosphate
  modified_base 15: mod_base = OTHER; note = 2'-O-methylcytidine-3'-phosphate
  modified_base 16: mod_base = OTHER; note = 2'-deoxy-2'-fluoroadenosine-3'-phosphate
  modified_base 17: mod_base = OTHER; note = 2'-O-methyluridine-3'-phosphate
  modified_base 18: mod_base = OTHER; note = 2'-O-methylguanosine-3'-phosphate
  modified_base 19: mod_base = OTHER; note = 2'-O-methylcytidine-3'-phosphate
  modified_base 20: mod_base = OTHER; note = 2'-O-methylguanosine-3'-phosphate
  modified_base 21: mod_base = OTHER; note = 2'-O-methyladenosine-3'-phosphorothioate
  modified_base 22: mod_base = OTHER; note = 2'-O-methyluridine-3'-phosphorothioate
  modified_base 23: mod_base = OTHER; note = 2'-O-methyluridine
tttttcaatgtgcacatgcgatt

SEQ ID NO: 311 - RNA, 21 nt, synthetic construct
  source 1..21: mol_type = other RNA
  modified_base 1: mod_base = OTHER; note = 2'-O-methylguanosine-3'-phosphorothioate
  modified_base 2: mod_base = OTHER; note = 2'-O-methylcytidine-3'-phosphorothioate
  modified_base 3: mod_base = OTHER; note = 2'-O-methyladenosine-3'-phosphate
  modified_base 4: mod_base = OTHER; note = 2'-O-methyluridine-3'-phosphate
  modified_base 5: mod_base = OTHER; note = 2'-O-methylguanosine-3'-phosphate
  modified_base 6: mod_base = OTHER; note = 2'-O-methyluridine-3'-phosphate
  modified_base 7: mod_base = OTHER; note = 2'-deoxy-2'-fluoroguanosine-3'-phosphate
  modified_base 8: mod_base = OTHER; note = 2'-O-methylcytidine-3'-phosphate
  modified_base 9: mod_base = OTHER; note = 2'-deoxy-2'-fluoroadenosine-3'-phosphate
  modified_base 10: mod_base = OTHER; note = 2'-deoxy-2'-fluorocytidine-3'-phosphate
  modified_base 11: mod_base = OTHER; note = 2'-deoxy-2'-fluoroadenosine-3'-phosphate
  modified_base 12: mod_base = OTHER; note = 2'-O-methyluridine-3'-phosphate
  modified_base 13: mod_base = OTHER; note = 2'-O-methyluridine-3'-phosphate
  modified_base 14: mod_base = OTHER; note = 2'-O-methylguanosine-3'-phosphate
  modified_base 15: mod_base = OTHER; note = 2'-O-methyladenosine-3'-phosphate
  modified_base 16: mod_base = OTHER; note = 2'-O-methyladenosine-3'-phosphate
  modified_base 17: mod_base = OTHER; note = 2'-O-methyladenosine-3'-phosphate
  modified_base 18: mod_base = OTHER; note = 2'-O-methyladenosine-3'-phosphate
  modified_base 19: mod_base = OTHER; note = 2'-O-methylcytidine-3'-phosphate
  modified_base 20: mod_base = OTHER; note = 2'-O-methyluridine-3'-phosphate
  modified_base 21: mod_base = OTHER; note = 2'-O-methyladenosine-3'-phosphate
gcatgtgcacattgaaaacta

SEQ ID NO: 312 - RNA, 23 nt, synthetic construct
  source 1..23: mol_type = other RNA
  modified_base 1: mod_base = OTHER; note = 2'-O-methyluridine-3'-phosphorothioate
  modified_base 2: mod_base = OTHER; note = 2'-deoxy-2'-fluoroadenosine-3'-phosphorothioate
  modified_base 3: mod_base = OTHER; note = 2'-O-methylguanosine-3'-phosphate
  modified_base 4: mod_base = OTHER; note = 2'-O-methyluridine-3'-phosphate
  modified_base 5: mod_base = OTHER; note = 2'-O-methyluridine-3'-phosphate
  modified_base 6: mod_base = OTHER; note = 2'-deoxy-2'-fluorouridine-3'-phosphate
  modified_base 7: mod_base = OTHER; note = 2'-O-methyluridine-3'-phosphate
  modified_base 8: mod_base = OTHER; note = 2'-deoxy-2'-fluorocytidine-3'-phosphate
  modified_base 9: mod_base = OTHER; note = 2'-deoxy-2'-fluoroadenosine-3'-phosphate
  modified_base 10: mod_base = OTHER; note = 2'-O-methyladenosine-3'-phosphate
  modified_base 11: mod_base = OTHER; note = 2'-O-methyluridine-3'-phosphate
  modified_base 12: mod_base = OTHER; note = 2'-O-methylguanosine-3'-phosphate
  modified_base 13: mod_base = OTHER; note = 2'-O-methyluridine-3'-phosphate
  modified_base 14: mod_base = OTHER; note = 2'-deoxy-2'-fluoroguanosine-3'-phosphate
  modified_base 15: mod_base = OTHER; note = 2'-O-methylcytidine-3'-phosphate
  modified_base 16: mod_base = OTHER; note = 2'-deoxy-2'-fluoroadenosine-3'-phosphate
  modified_base 17: mod_base = OTHER; note = 2'-O-methylcytidine-3'-phosphate
  modified_base 18: mod_base = OTHER; note = 2'-O-methyladenosine-3'-phosphate
  modified_base 19: mod_base = OTHER; note = 2'-O-methyluridine-3'-phosphate
  modified_base 20: mod_base = OTHER; note = 2'-O-methylguanosine-3'-phosphate
  modified_base 21: mod_base = OTHER; note = 2'-O-methylcytidine-3'-phosphorothioate
  modified_base 22: mod_base = OTHER; note = 2'-O-methylguanosine-3'-phosphorothioate
  modified_base 23: mod_base = OTHER; note = 2'-O-methyladenosine
tagttttcaatgtgcacatgcga

SEQ ID NO: 313 - RNA, 21 nt, synthetic construct
  source 1..21: mol_type = other RNA
  modified_base 1: mod_base = OTHER; note = 2'-O-methylcytidine-3'-phosphorothioate
  modified_base 2: mod_base = OTHER; note = 2'-O-methyladenosine-3'-phosphorothioate
  modified_base 3: mod_base = OTHER; note = 2'-O-methyluridine-3'-phosphate
  modified_base 4: mod_base = OTHER; note = 2'-O-methylguanosine-3'-phosphate
  modified_base 5: mod_base = OTHER; note = 2'-O-methyluridine-3'-phosphate
  modified_base 6: mod_base = OTHER; note = 2'-O-methylguanosine-3'-phosphate
  modified_base 7: mod_base = OTHER; note = 2'-deoxy-2'-fluorocytidine-3'-phosphate
  modified_base 8: mod_base = OTHER; note = 2'-O-methyladenosine-3'-phosphate
  modified_base 9: mod_base = OTHER; note = 2'-deoxy-2'-fluorocytidine-3'-phosphate
  modified_base 10: mod_base = OTHER; note = 2'-deoxy-2'-fluoroadenosine-3'-phosphate
  modified_base 11: mod_base = OTHER; note = 2'-deoxy-2'-fluorouridine-3'-phosphate
  modified_base 12: mod_base = OTHER; note = 2'-O-methyluridine-3'-phosphate
  modified_base 13: mod_base = OTHER; note = 2'-O-methylguanosine-3'-phosphate
  modified_base 14: mod_base = OTHER; note = 2'-O-methyladenosine-3'-phosphate
  modified_base 15: mod_base = OTHER; note = 2'-O-methyladenosine-3'-phosphate
  modified_base 16: mod_base = OTHER; note = 2'-O-methyladenosine-3'-phosphate
  modified_base 17: mod_base = OTHER; note = 2'-O-methyladenosine-3'-phosphate
  modified_base 18: mod_base = OTHER; note = 2'-O-methylcytidine-3'-phosphate
  modified_base 19: mod_base = OTHER; note = 2'-O-methyluridine-3'-phosphate
  modified_base 20: mod_base = OTHER; note = 2'-O-methylguanosine-3'-phosphate
  modified_base 21: mod_base = OTHER; note = 2'-O-methyladenosine-3'-phosphate
catgtgcacattgaaaactga

SEQ ID NO: 314 - RNA, 23 nt, synthetic construct
  source 1..23: mol_type = other RNA
  modified_base 1: mod_base = OTHER; note = 2'-O-methyluridine-3'-phosphorothioate
  modified_base 2: mod_base = OTHER; note = 2'-deoxy-2'-fluorocytidine-3'-phosphorothioate
  modified_base 3: mod_base = OTHER; note = 2'-O-methyladenosine-3'-phosphate
  modified_base 4: mod_base = OTHER; note = 2'-O-methylguanosine-3'-phosphate
  modified_base 5: mod_base = OTHER; note = 2'-O-methyluridine-3'-phosphate
  modified_base 6: mod_base = OTHER; note = 2'-deoxy-2'-fluorouridine-3'-phosphate
  modified_base 7: mod_base = OTHER; note = 2'-O-methyluridine-3'-phosphate
  modified_base 8: mod_base = OTHER; note = 2'-deoxy-2'-fluorouridine-3'-phosphate
  modified_base 9: mod_base = OTHER; note = 2'-deoxy-2'-fluorocytidine-3'-phosphate
  modified_base 10: mod_base = OTHER; note = 2'-O-methyladenosine-3'-phosphate
  modified_base 11: mod_base = OTHER; note = 2'-O-methyladenosine-3'-phosphate
  modified_base 12: mod_base = OTHER; note = 2'-O-methyluridine-3'-phosphate
  modified_base 13: mod_base = OTHER; note = 2'-O-methylguanosine-3'-phosphate
  modified_base 14: mod_base = OTHER; note = 2'-deoxy-2'-fluorouridine-3'-phosphate
  modified_base 15: mod_base = OTHER; note = 2'-O-methylguanosine-3'-phosphate
  modified_base 16: mod_base = OTHER; note = 2'-deoxy-2'-fluorocytidine-3'-phosphate
  modified_base 17: mod_base = OTHER; note = 2'-O-methyladenosine-3'-phosphate
  modified_base 18: mod_base = OTHER; note = 2'-O-methylcytidine-3'-phosphate
  modified_base 19: mod_base = OTHER; note = 2'-O-methyladenosine-3'-phosphate
  modified_base 20: mod_base = OTHER; note = 2'-O-methyluridine-3'-phosphate
  modified_base 21: mod_base = OTHER; note = 2'-O-methylguanosine-3'-phosphorothioate
  modified_base 22: mod_base = OTHER; note = 2'-O-methylcytidine-3'-phosphorothioate
  modified_base 23: mod_base = OTHER; note = 2'-O-methylguanosine
tcagttttcaatgtgcacatgcg

SEQ ID NO: 315 - RNA, 21 nt, synthetic construct
  source 1..21: mol_type = other RNA
  modified_base 1: mod_base = OTHER; note = 2'-O-methyladenosine-3'-phosphorothioate
  modified_base 2: mod_base = OTHER; note = 2'-O-methyluridine-3'-phosphorothioate
  modified_base 3: mod_base = OTHER; note = 2'-O-methylguanosine-3'-phosphate
  modified_base 4: mod_base = OTHER; note = 2'-O-methyluridine-3'-phosphate
  modified_base 5: mod_base = OTHER; note = 2'-O-methylguanosine-3'-phosphate
  modified_base 6: mod_base = OTHER; note = 2'-O-methylcytidine-3'-phosphate
  modified_base 7: mod_base = OTHER; note = 2'-deoxy-2'-fluoroadenosine-3'-phosphate
  modified_base 8: mod_base = OTHER; note = 2'-O-methylcytidine-3'-phosphate
  modified_base 9: mod_base = OTHER; note = 2'-deoxy-2'-fluoroadenosine-3'-phosphate
  modified_base 10: mod_base = OTHER; note = 2'-deoxy-2'-fluorouridine-3'-phosphate
  modified_base 11: mod_base = OTHER; note = 2'-deoxy-2'-fluorouridine-3'-phosphate
  modified_base 12: mod_base = OTHER; note = 2'-O-methylguanosine-3'-phosphate
  modified_base 13: mod_base = OTHER; note = 2'-O-methyladenosine-3'-phosphate
  modified_base 14: mod_base = OTHER; note = 2'-O-methyladenosine-3'-phosphate
  modified_base 15: mod_base = OTHER; note = 2'-O-methyladenosine-3'-phosphate
  modified_base 16: mod_base = OTHER; note = 2'-O-methyladenosine-3'-phosphate
  modified_base 17: mod_base = OTHER; note = 2'-O-methylcytidine-3'-phosphate
  modified_base 18: mod_base = OTHER; note = 2'-O-methyluridine-3'-phosphate
  modified_base 19: mod_base = OTHER; note = 2'-O-methylguanosine-3'-phosphate
  modified_base 20: mod_base = OTHER; note = 2'-O-methyluridine-3'-phosphate
  modified_base 21: mod_base = OTHER; note = 2'-O-methyladenosine-3'-phosphate
atgtgcacattgaaaactgta

SEQ ID NO: 316 - RNA, 23 nt, synthetic construct
  source 1..23: mol_type = other RNA
  modified_base 1: mod_base = OTHER; note = 2'-O-methyluridine-3'-phosphorothioate
  modified_base 2: mod_base = OTHER; note = 2'-deoxy-2'-fluoroadenosine-3'-phosphorothioate
  modified_base 3: mod_base = OTHER; note = 2'-O-methylcytidine-3'-phosphate
  modified_base 4: mod_base = OTHER; note = 2'-O-methyladenosine-3'-phosphate
  modified_base 5: mod_base = OTHER; note = 2'-O-methylguanosine-3'-phosphate
  modified_base 6: mod_base = OTHER; note = 2'-deoxy-2'-fluorouridine-3'-phosphate
  modified_base 7: mod_base = OTHER; note = 2'-O-methyluridine-3'-phosphate
  modified_base 8: mod_base = OTHER; note = 2'-deoxy-2'-fluorouridine-3'-phosphate
  modified_base 9: mod_base = OTHER; note = 2'-deoxy-2'-fluorouridine-3'-phosphate
  modified_base 10: mod_base = OTHER; note = 2'-O-methylcytidine-3'-phosphate
  modified_base 11: mod_base = OTHER; note = 2'-O-methyladenosine-3'-phosphate
  modified_base 12: mod_base = OTHER; note = 2'-O-methyladenosine-3'-phosphate
  modified_base 13: mod_base = OTHER; note = 2'-O-methyluridine-3'-phosphate
  modified_base 14: mod_base = OTHER; note = 2'-deoxy-2'-fluoroguanosine-3'-phosphate
  modified_base 15: mod_base = OTHER; note = 2'-O-methyluridine-3'-phosphate
  modified_base 16: mod_base = OTHER; note = 2'-deoxy-2'-fluoroguanosine-3'-phosphate
  modified_base 17: mod_base = OTHER; note = 2'-O-methylcytidine-3'-phosphate
  modified_base 18: mod_base = OTHER; note = 2'-O-methyladenosine-3'-phosphate
  modified_base 19: mod_base = OTHER; note = 2'-O-methylcytidine-3'-phosphate
  modified_base 20: mod_base = OTHER; note = 2'-O-methyladenosine-3'-phosphate
  modified_base 21: mod_base = OTHER; note = 2'-O-methyluridine-3'-phosphorothioate
  modified_base 22: mod_base = OTHER; note = 2'-O-methylguanosine-3'-phosphorothioate
  modified_base 23: mod_base = OTHER; note = 2'-O-methylcytidine
tacagttttcaatgtgcacatgc

SEQ ID NO: 317 - RNA, 21 nt, synthetic construct
  source 1..21: mol_type = other RNA
  modified_base 1: mod_base = OTHER; note = 2'-O-methyladenosine-3'-phosphorothioate
  modified_base 2: mod_base = OTHER; note = 2'-O-methyluridine-3'-phosphorothioate
  modified_base 3: mod_base = OTHER; note = 2'-O-methylguanosine-3'-phosphate
  modified_base 4: mod_base = OTHER; note = 2'-O-methylguanosine-3'-phosphate
  modified_base 5: mod_base = OTHER; note = 2'-O-methyluridine-3'-phosphate
  modified_base 6: mod_base = OTHER; note = 2'-O-methylcytidine-3'-phosphate
  modified_base 7: mod_base = OTHER; note = 2'-deoxy-2'-fluoroadenosine-3'-phosphate
  modified_base 8: mod_base = OTHER; note = 2'-O-methylguanosine-3'-phosphate
  modified_base 9: mod_base = OTHER; note = 2'-deoxy-2'-fluoroadenosine-3'-phosphate
  modified_base 10: mod_base = OTHER; note = 2'-deoxy-2'-fluorouridine-3'-phosphate
  modified_base 11: mod_base = OTHER; note = 2'-deoxy-2'-fluorocytidine-3'-phosphate
  modified_base 12: mod_base = OTHER; note = 2'-O-methyluridine-3'-phosphate
  modified_base 13: mod_base = OTHER; note = 2'-O-methyluridine-3'-phosphate
  modified_base 14: mod_base = OTHER; note = 2'-O-methylcytidine-3'-phosphate
  modified_base 15: mod_base = OTHER; note = 2'-O-methyladenosine-3'-phosphate
  modified_base 16: mod_base = OTHER; note = 2'-O-methyladenosine-3'-phosphate
  modified_base 17: mod_base = OTHER; note = 2'-O-methyladenosine-3'-phosphate
  modified_base 18: mod_base = OTHER; note = 2'-O-methyladenosine-3'-phosphate
  modified_base 19: mod_base = OTHER; note = 2'-O-methyluridine-3'-phosphate
  modified_base 20: mod_base = OTHER; note = 2'-O-methyladenosine-3'-phosphate
  modified_base 21: mod_base = OTHER; note = 2'-O-methyladenosine-3'-phosphate
atggtcagatcttcaaaataa

SEQ ID NO: 318 - RNA, 23 nt, synthetic construct
  source 1..23: mol_type = other RNA
  modified_base 1: mod_base = OTHER; note = 2'-O-methyluridine-3'-phosphorothioate
  modified_base 2: mod_base = OTHER; note = 2'-deoxy-2'-fluorouridine-3'-phosphorothioate
  modified_base 3: mod_base = OTHER; note = 2'-O-methyladenosine-3'-phosphate
  modified_base 4: mod_base = OTHER; note = 2'-O-methyluridine-3'-phosphate
  modified_base 5: mod_base = OTHER; note = 2'-O-methyluridine-3'-phosphate
  modified_base 6: mod_base = OTHER; note = 2'-deoxy-2'-fluorouridine-3'-phosphate
  modified_base 7: mod_base = OTHER; note = 2'-O-methyluridine-3'-phosphate
  modified_base 8: mod_base = OTHER; note = 2'-deoxy-2'-fluoroguanosine-3'-phosphate
  modified_base 9: mod_base = OTHER; note = 2'-deoxy-2'-fluoroadenosine-3'-phosphate
  modified_base 10: mod_base = OTHER; note = 2'-O-methyladenosine-3'-phosphate
  modified_base 11: mod_base = OTHER; note = 2'-O-methylguanosine-3'-phosphate
  modified_base 12: mod_base = OTHER; note = 2'-O-methyladenosine-3'-phosphate
  modified_base 13: mod_base = OTHER; note = 2'-O-methyluridine-3'-phosphate
  modified_base 14: mod_base = OTHER; note = 2'-deoxy-2'-fluorocytidine-3'-phosphate
  modified_base 15: mod_base = OTHER; note = 2'-O-methyluridine-3'-phosphate
  modified_base 16: mod_base = OTHER; note = 2'-deoxy-2'-fluoroguanosine-3'-phosphate
  modified_base 17: mod_base = OTHER; note = 2'-O-methyladenosine-3'-phosphate
  modified_base 18: mod_base = OTHER; note = 2'-O-methylcytidine-3'-phosphate
  modified_base 19: mod_base = OTHER; note = 2'-O-methylcytidine-3'-phosphate
  modified_base 20: mod_base = OTHER; note = 2'-O-methyladenosine-3'-phosphate
  modified_base 21: mod_base = OTHER; note = 2'-O-methyluridine-3'-phosphorothioate
  modified_base 22: mod_base = OTHER; note = 2'-O-methyluridine-3'-phosphorothioate
  modified_base 23: mod_base = OTHER; note = 2'-O-methylguanosine
ttattttgaagatctgaccattg

SEQ ID NO: 319 - RNA, 21 nt, synthetic construct
  source 1..21: mol_type = other RNA
  modified_base 1: mod_base = OTHER; note = 2'-O-methyladenosine-3'-phosphorothioate
  modified_base 2: mod_base = OTHER; note = 2'-O-methyladenosine-3'-phosphorothioate
  modified_base 3: mod_base = OTHER; note = 2'-O-methyladenosine-3'-phosphate
  modified_base 4: mod_base = OTHER; note = 2'-O-methyluridine-3'-phosphate
  modified_base 5: mod_base = OTHER; note = 2'-O-methyluridine-3'-phosphate
  modified_base 6: mod_base = OTHER; note = 2'-O-methyluridine-3'-phosphate
  modified_base 7: mod_base = OTHER; note = 2'-deoxy-2'-fluoroguanosine-3'-phosphate
  modified_base 8: mod_base = OTHER; note = 2'-O-methyluridine-3'-phosphate
  modified_base 9: mod_base = OTHER; note = 2'-deoxy-2'-fluoroguanosine-3'-phosphate
  modified_base 10: mod_base = OTHER; note = 2'-deoxy-2'-fluorouridine-3'-phosphate
  modified_base 11: mod_base = OTHER; note = 2'-deoxy-2'-fluorouridine-3'-phosphate
  modified_base 12: mod_base = OTHER; note = 2'-O-methylcytidine-3'-phosphate
  modified_base 13: mod_base = OTHER; note = 2'-O-methyladenosine-3'-phosphate
  modified_base 14: mod_base = OTHER; note = 2'-O-methylcytidine-3'-phosphate
  modified_base 15: mod_base = OTHER; note = 2'-O-methyladenosine-3'-phosphate
  modified_base 16: mod_base = OTHER; note = 2'-O-methyladenosine-3'-phosphate
  modified_base 17: mod_base = OTHER; note = 2'-O-methyladenosine-3'-phosphate
  modified_base 18: mod_base = OTHER; note = 2'-O-methylguanosine-3'-phosphate
  modified_base 19: mod_base = OTHER; note = 2'-O-methylguanosine-3'-phosphate
  modified_base 20: mod_base = OTHER; note = 2'-O-methyladenosine-3'-phosphate
  modified_base 21: mod_base = OTHER; note = 2'-O-methyladenosine-3'-phosphate
aaatttgtgttcacaaaggaa

SEQ ID NO: 320 - RNA, 23 nt, synthetic construct
  source 1..23: mol_type = other RNA
  modified_base 1: mod_base = OTHER; note = 2'-O-methyluridine-3'-phosphorothioate
  modified_base 2: mod_base = OTHER; note = 2'-deoxy-2'-fluorouridine-3'-phosphorothioate
  modified_base 3: mod_base = OTHER; note = 2'-O-methylcytidine-3'-phosphate
  modified_base 4: mod_base = OTHER; note = 2'-O-methylcytidine-3'-phosphate
  modified_base 5: mod_base = OTHER; note = 2'-O-methyluridine-3'-phosphate
  modified_base 6: mod_base = OTHER; note = 2'-deoxy-2'-fluorouridine-3'-phosphate
  modified_base 7: mod_base = OTHER; note = 2'-O-methyluridine-3'-phosphate
  modified_base 8: mod_base = OTHER; note = 2'-deoxy-2'-fluoroguanosine-3'-phosphate
  modified_base 9: mod_base = OTHER; note = 2'-deoxy-2'-fluorouridine-3'-phosphate
  modified_base 10: mod_base = OTHER; note = 2'-O-methylguanosine-3'-phosphate
  modified_base 11: mod_base = OTHER; note = 2'-O-methyladenosine-3'-phosphate
  modified_base 12: mod_base = OTHER; note = 2'-O-methyladenosine-3'-phosphate
  modified_base 13: mod_base = OTHER; note = 2'-O-methylcytidine-3'-phosphate
  modified_base 14: mod_base = OTHER; note = 2'-deoxy-2'-fluoroadenosine-3'-phosphate
  modified_base 15: mod_base = OTHER; note = 2'-O-methylcytidine-3'-phosphate
  modified_base 16: mod_base = OTHER; note = 2'-deoxy-2'-fluoroadenosine-3'-phosphate
  modified_base 17: mod_base = OTHER; note = 2'-O-methyladenosine-3'-phosphate
  modified_base 18: mod_base = OTHER; note = 2'-O-methyladenosine-3'-phosphate
  modified_base 19: mod_base = OTHER; note = 2'-O-methyluridine-3'-phosphate
  modified_base 20: mod_base = OTHER; note = 2'-O-methyluridine-3'-phosphate
  modified_base 21: mod_base = OTHER; note = 2'-O-methyluridine-3'-phosphorothioate
  modified_base 22: mod_base = OTHER; note = 2'-O-methylcytidine-3'-phosphorothioate
  modified_base 23: mod_base = OTHER; note = 2'-O-methyluridine
ttcctttgtgaacacaaatttct

SEQ ID NO: 321 - RNA, 21 nt, synthetic construct
  source 1..21: mol_type = other RNA
  modified_base 1: mod_base = OTHER; note = 2'-O-methyladenosine-3'-phosphorothioate
  modified_base 2: mod_base = OTHER; note = 2'-O-methyluridine-3'-phosphorothioate
  modified_base 3: mod_base = OTHER; note = 2'-O-methyluridine-3'-phosphate
  modified_base 4: mod_base = OTHER; note = 2'-O-methyluridine-3'-phosphate
  modified_base 5: mod_base = OTHER; note = 2'-O-methylguanosine-3'-phosphate
  modified_base 6: mod_base = OTHER; note = 2'-O-methyluridine-3'-phosphate
  modified_base 7: mod_base = OTHER; note = 2'-deoxy-2'-fluoroguanosine-3'-phosphate
  modified_base 8: mod_base = OTHER; note = 2'-O-methyluridine-3'-phosphate
  modified_base 9: mod_base = OTHER; note = 2'-deoxy-2'-fluorouridine-3'-phosphate
  modified_base 10: mod_base = OTHER; note = 2'-deoxy-2'-fluorocytidine-3'-phosphate
  modified_base 11: mod_base = OTHER; note = 2'-deoxy-2'-fluoroadenosine-3'-phosphate
  modified_base 12: mod_base = OTHER; note = 2'-O-methylcytidine-3'-phosphate
  modified_base 13: mod_base = OTHER; note = 2'-O-methyladenosine-3'-phosphate
  modified_base 14: mod_base = OTHER; note = 2'-O-methyladenosine-3'-phosphate
  modified_base 15: mod_base = OTHER; note = 2'-O-methyladenosine-3'-phosphate
  modified_base 16: mod_base = OTHER; note = 2'-O-methylguanosine-3'-phosphate
  modified_base 17: mod_base = OTHER; note = 2'-O-methylguanosine-3'-phosphate
  modified_base 18: mod_base = OTHER; note = 2'-O-methyladenosine-3'-phosphate
  modified_base 19: mod_base = OTHER; note = 2'-O-methyladenosine-3'-phosphate
  modified_base 20: mod_base = OTHER; note = 2'-O-methyladenosine-3'-phosphate
  modified_base 21: mod_base = OTHER; note = 2'-O-methyladenosine-3'-phosphate
atttgtgttcacaaaggaaaa

SEQ ID NO: 322 - RNA, 23 nt, synthetic construct
  source 1..23: mol_type = other RNA
  modified_base 1: mod_base = OTHER; note = 2'-O-methyluridine-3'-phosphorothioate
  modified_base 2: mod_base = OTHER; note = 2'-deoxy-2'-fluorouridine-3'-phosphorothioate
  modified_base 3: mod_base = OTHER; note = 2'-O-methyluridine-3'-phosphate
  modified_base 4: mod_base = OTHER; note = 2'-O-methyluridine-3'-phosphate
  modified_base 5: mod_base = OTHER; note = 2'-O-methylcytidine-3'-phosphate
  modified_base 6: mod_base = OTHER; note = 2'-deoxy-2'-fluorocytidine-3'-phosphate
  modified_base 7: mod_base = OTHER; note = 2'-O-methyluridine-3'-phosphate
  modified_base 8: mod_base = OTHER; note = 2'-deoxy-2'-fluorouridine-3'-phosphate
  modified_base 9: mod_base = OTHER; note = 2'-deoxy-2'-fluorouridine-3'-phosphate
  modified_base 10: mod_base = OTHER; note = 2'-O-methylguanosine-3'-phosphate
  modified_base 11: mod_base = OTHER; note = 2'-O-methyluridine-3'-phosphate
  modified_base 12: mod_base = OTHER; note = 2'-O-methylguanosine-3'-phosphate
  modified_base 13: mod_base = OTHER; note = 2'-O-methyladenosine-3'-phosphate
  modified_base 14: mod_base = OTHER; note = 2'-deoxy-2'-fluoroadenosine-3'-phosphate
  modified_base 15: mod_base = OTHER; note = 2'-O-methylcytidine-3'-phosphate
  modified_base 16: mod_base = OTHER; note = 2'-deoxy-2'-fluoroadenosine-3'-phosphate
  modified_base 17: mod_base = OTHER; note = 2'-O-methylcytidine-3'-phosphate
  modified_base 18: mod_base = OTHER; note = 2'-O-methyladenosine-3'-phosphate
  modified_base 19: mod_base = OTHER; note = 2'-O-methyladenosine-3'-phosphate
  modified_base 20: mod_base = OTHER; note = 2'-O-methyladenosine-3'-phosphate
  modified_base 21: mod_base = OTHER; note = 2'-O-methyluridine-3'-phosphorothioate
  modified_base 22: mod_base = OTHER; note = 2'-O-methyluridine-3'-phosphorothioate
  modified_base 23: mod_base = OTHER; note = 2'-O-methyluridine
ttttcctttgtgaacacaaattt

SEQ ID NO: 323 - protein, 16 aa, synthetic construct
AAVALLPAVLLALLAP

SEQ ID NO: 324 - protein, 11 aa, synthetic construct
AALLPVLLAAP

SEQ ID NO: 325 - protein, 13 aa, synthetic construct
GRKKRRQRRRPPQ

SEQ ID NO: 326 - protein, 16 aa, synthetic construct
RQIKIWFQNRRMKWKK

SEQ ID NO: 327 - RNA, 23 nt, synthetic construct
  source 1..23: mol_type = other RNA
ttttcctttgtgaacacaaattt

SEQ ID NO: 328 - RNA, 21 nt, synthetic construct
  source 1..21: mol_type = other RNA
  modified_base 1: mod_base = OTHER; note = 2'-O-methyladenosine-3'-phosphorothioate
  modified_base 2: mod_base = OTHER; note = 2'-O-methylcytidine-3'-phosphorothioate
  modified_base 3: mod_base = OTHER; note = 2'-O-methylcytidine-3'-phosphate
  modified_base 4: mod_base = OTHER; note = 2'-O-methyladenosine-3'-phosphate
  modified_base 5: mod_base = OTHER; note = 2'-O-methylguanosine-3'-phosphate
  modified_base 6: mod_base = OTHER; note = 2'-O-methyladenosine-3'-phosphate
  modified_base 7: mod_base = OTHER; note = 2'-deoxy-2'-fluorouridine-3'-phosphate
  modified_base 8: mod_base = OTHER; note = 2'-O-methylguanosine-3'-phosphate
  modified_base 9: mod_base = OTHER; note = 2'-deoxy-2'-fluorouridine-3'-phosphate
  modified_base 10: mod_base = OTHER; note = 2'-deoxy-2'-fluorouridine-3'-phosphate
  modified_base 11: mod_base = OTHER; note = 2'-deoxy-2'-fluorouridine-3'-phosphate
  modified_base 12: mod_base = OTHER; note = 2'-O-methyluridine-3'-phosphate
  modified_base 13: mod_base = OTHER; note = 2'-O-methylcytidine-3'-phosphate
  modified_base 14: mod_base = OTHER; note = 2'-O-methylcytidine-3'-phosphate
  modified_base 15: mod_base = OTHER; note = 2'-O-methyladenosine-3'-phosphate
  modified_base 16: mod_base = OTHER; note = 2'-O-methylcytidine-3'-phosphate
  modified_base 17: mod_base = OTHER; note = 2'-O-methylcytidine-3'-phosphate
  modified_base 18: mod_base = OTHER; note = 2'-O-methyladenosine-3'-phosphate
  modified_base 19: mod_base = OTHER; note = 2'-O-methyladenosine-3'-phosphate
  modified_base 20: mod_base = OTHER; note = 2'-O-methyladenosine-3'-phosphate
  modified_base 21: mod_base = OTHER; note = 2'-O-methyladenosine-3'-phosphate
accagatgttttccaccaaaa

SEQ ID NO: 329 - RNA, 23 nt, synthetic construct
  source 1..23: mol_type = other RNA
  modified_base 1: mod_base = OTHER; note = 2'-O-methyluridine-3'-phosphorothioate
  modified_base 2: mod_base = OTHER; note = 2'-deoxy-2'-fluorouridine-3'-phosphorothioate
  modified_base 3: mod_base = OTHER; note = 2'-O-methyluridine-3'-phosphate
  modified_base 4: mod_base = OTHER; note = 2'-O-methyluridine-3'-phosphate
  modified_base 5: mod_base = OTHER; note = 2'-O-methylguanosine-3'-phosphate
  modified_base 6: mod_base = OTHER; note = 2'-deoxy-2'-fluoroguanosine-3'-phosphate
  modified_base 7: mod_base = OTHER; note = 2'-O-methyluridine-3'-phosphate
  modified_base 8: mod_base = OTHER; note = 2'-deoxy-2'-fluoroguanosine-3'-phosphate
  modified_base 9: mod_base = OTHER; note = 2'-deoxy-2'-fluoroguanosine-3'-phosphate
  modified_base 10: mod_base = OTHER; note = 2'-O-methyladenosine-3'-phosphate
  modified_base 11: mod_base = OTHER; note = 2'-O-methyladenosine-3'-phosphate
  modified_base 12: mod_base = OTHER; note = 2'-O-methyladenosine-3'-phosphate
  modified_base 13: mod_base = OTHER; note = 2'-O-methyladenosine-3'-phosphate
  modified_base 14: mod_base = OTHER; note = 2'-deoxy-2'-fluorocytidine-3'-phosphate
  modified_base 15: mod_base = OTHER; note = 2'-O-methyladenosine-3'-phosphate
  modified_base 16: mod_base = OTHER; note = 2'-deoxy-2'-fluorouridine-3'-phosphate
  modified_base 17: mod_base = OTHER; note = 2'-O-methylcytidine-3'-phosphate
  modified_base 18: mod_base = OTHER; note = 2'-O-methyluridine-3'-phosphate
  modified_base 19: mod_base = OTHER; note = 2'-O-methylguanosine-3'-phosphate
  modified_base 20: mod_base = OTHER; note = 2'-O-methylguanosine-3'-phosphate
  modified_base 21: mod_base = OTHER; note = 2'-O-methyluridine-3'-phosphorothioate
  modified_base 22: mod_base = OTHER; note = 2'-O-methyluridine-3'-phosphorothioate
  modified_base 23: mod_base = OTHER; note = 2'-O-methyluridine
ttttggtggaaaacatctggttt

SEQ ID NO: 330 - RNA, 21 nt, synthetic construct
  source 1..21: mol_type = other RNA
  modified_base 1: mod_base = OTHER; note = 2'-O-methyladenosine-3'-phosphorothioate
  modified_base 2: mod_base = OTHER; note = 2'-O-methyluridine-3'-phosphorothioate
  modified_base 3: mod_base = OTHER; note = 2'-O-methylguanosine-3'-phosphate
  modified_base 4: mod_base = OTHER; note = 2'-O-methylguanosine-3'-phosphate
  modified_base 5: mod_base = OTHER; note = 2'-O-methylcytidine-3'-phosphate
  modified_base 6: mod_base = OTHER; note = 2'-O-methyluridine-3'-phosphate
  modified_base 7: mod_base = OTHER; note = 2'-deoxy-2'-fluoroguanosine-3'-phosphate
  modified_base 8: mod_base = OTHER; note = 2'-O-methyluridine-3'-phosphate
  modified_base 9: mod_base = OTHER; note = 2'-deoxy-2'-fluoroguanosine-3'-phosphate
  modified_base 10: mod_base = OTHER; note = 2'-deoxy-2'-fluoroguanosine-3'-phosphate
  modified_base 11: mod_base = OTHER; note = 2'-deoxy-2'-fluoroadenosine-3'-phosphate
  modified_base 12: mod_base = OTHER; note = 2'-O-methylcytidine-3'-phosphate
  modified_base 13: mod_base = OTHER; note = 2'-O-methyladenosine-3'-phosphate
  modified_base 14: mod_base = OTHER; note = 2'-O-methylguanosine-3'-phosphate
  modified_base 15: mod_base = OTHER; note = 2'-O-methyluridine-3'-phosphate
  modified_base 16: mod_base = OTHER; note = 2'-O-methyladenosine-3'-phosphate
  modified_base 17: mod_base = OTHER; note = 2'-O-methylcytidine-3'-phosphate
  modified_base 18: mod_base = OTHER; note = 2'-O-methyluridine-3'-phosphate
  modified_base 19: mod_base = OTHER; note = 2'-O-methylcytidine-3'-phosphate
  modified_base 20: mod_base = OTHER; note = 2'-O-methyluridine-3'-phosphate
  modified_base 21: mod_base = OTHER; note = 2'-O-methyladenosine-3'-phosphate
atggctgtggacagtactcta

SEQ ID NO: 331 - RNA, 23 nt, synthetic construct
  source 1..23: mol_type = other RNA
  modified_base 1: mod_base = OTHER; note = 2'-O-methyluridine-3'-phosphorothioate
  modified_base 2: mod_base = OTHER; note = 2'-deoxy-2'-fluoroadenosine-3'-phosphorothioate
  modified_base 3: mod_base = OTHER; note = 2'-O-methylguanosine-3'-phosphate
  modified_base 4: mod_base = OTHER; note = 2'-O-methyladenosine-3'-phosphate
  modified_base 5: mod_base = OTHER; note = 2'-O-methylguanosine-3'-phosphate
  modified_base 6: mod_base = OTHER; note = 2'-deoxy-2'-fluorouridine-3'-phosphate
  modified_base 7: mod_base = OTHER; note = 2'-O-methyladenosine-3'-phosphate
  modified_base 8: mod_base = OTHER; note = 2'-deoxy-2'-fluorocytidine-3'-phosphate
  modified_base 9: mod_base = OTHER; note = 2'-deoxy-2'-fluorouridine-3'-phosphate
  modified_base 10: mod_base = OTHER; note = 2'-O-methylguanosine-3'-phosphate
  modified_base 11: mod_base = OTHER; note = 2'-O-methyluridine-3'-phosphate
  modified_base 12: mod_base = OTHER; note = 2'-O-methylcytidine-3'-phosphate
  modified_base 13: mod_base = OTHER; note = 2'-O-methylcytidine-3'-phosphate
  modified_base 14: mod_base = OTHER; note = 2'-deoxy-2'-fluoroadenosine-3'-phosphate
  modified_base 15: mod_base = OTHER; note = 2'-O-methylcytidine-3'-phosphate
  modified_base 16: mod_base = OTHER; note = 2'-deoxy-2'-fluoroadenosine-3'-phosphate
  modified_base 17: mod_base = OTHER; note = 2'-O-methylguanosine-3'-phosphate
  modified_base 18: mod_base = OTHER; note = 2'-O-methylcytidine-3'-phosphate
  modified_base 19: mod_base = OTHER; note = 2'-O-methylcytidine-3'-phosphate
  modified_base 20: mod_base = OTHER; note = 2'-O-methyladenosine-3'-phosphate
  modified_base 21: mod_base = OTHER; note = 2'-O-methyluridine-3'-phosphorothioate
  modified_base 22: mod_base = OTHER; note = 2'-O-methylguanosine-3'-phosphorothioate
  modified_base 23: mod_base = OTHER; note = 2'-O-methylguanosine
tagagtactgtccacagccatgg

SEQ ID NO: 332 - RNA, 21 nt, synthetic construct
  source 1..21: mol_type = other RNA
  modified_base 1: mod_base = OTHER; note = 2'-O-methylcytidine-3'-phosphorothioate
  modified_base 2: mod_base = OTHER; note = 2'-O-methyladenosine-3'-phosphorothioate
  modified_base 3: mod_base = OTHER; note = 2'-O-methylguanosine-3'-phosphate
  modified_base 4: mod_base = OTHER; note = 2'-O-methylguanosine-3'-phosphate
  modified_base 5: mod_base = OTHER; note = 2'-O-methyladenosine-3'-phosphate
  modified_base 6: mod_base = OTHER; note = 2'-O-methylguanosine-3'-phosphate
  modified_base 7: mod_base = OTHER; note = 2'-deoxy-2'-fluoroadenosine-3'-phosphate
  modified_base 8: mod_base = OTHER; note = 2'-O-methyladenosine-3'-phosphate
  modified_base 9: mod_base = OTHER; note = 2'-deoxy-2'-fluoroadenosine-3'-phosphate
  modified_base 10: mod_base = OTHER; note = 2'-deoxy-2'-fluorocytidine-3'-phosphate
  modified_base 11: mod_base = OTHER; note = 2'-deoxy-2'-fluorocytidine-3'-phosphate
  modified_base 12: mod_base = OTHER; note = 2'-O-methyluridine-3'-phosphate
  modified_base 13: mod_base = OTHER; note = 2'-O-methyluridine-3'-phosphate
  modified_base 14: mod_base = OTHER; note = 2'-O-methyladenosine-3'-phosphate
  modified_base 15: mod_base = OTHER; note = 2'-O-methyluridine-3'-phosphate
  modified_base 16: mod_base = OTHER; note = 2'-O-methylcytidine-3'-phosphate
  modified_base 17: mod_base = OTHER; note = 2'-O-methyladenosine-3'-phosphate
  modified_base 18: mod_base = OTHER; note = 2'-O-methyladenosine-3'-phosphate
  modified_base 19: mod_base = OTHER; note = 2'-O-methyladenosine-3'-phosphate
  modified_base 20: mod_base = OTHER; note = 2'-O-methyladenosine-3'-phosphate
  modified_base 21: mod_base = OTHER; note = 2'-O-methyladenosine-3'-phosphate
caggagaaaccttatcaaaaa

SEQ ID NO: 333 - RNA, 23 nt, synthetic construct
  source 1..23: mol_type = other RNA
  modified_base 1: mod_base = OTHER; note = 2'-O-methyluridine-3'-phosphorothioate
  modified_base 2: mod_base = OTHER; note = 2'-deoxy-2'-fluorouridine-3'-phosphorothioate
  modified_base 3: mod_base = OTHER; note = 2'-O-methyluridine-3'-phosphate
  modified_base 4: mod_base = OTHER; note = 2'-O-methyluridine-3'-phosphate
  modified_base 5: mod_base = OTHER; note = 2'-O-methyluridine-3'-phosphate
  modified_base 6: mod_base = OTHER; note = 2'-deoxy-2'-fluoroguanosine-3'-phosphate
  modified_base 7: mod_base = OTHER; note = 2'-O-methyladenosine-3'-phosphate
  modified_base 8: mod_base = OTHER; note = 2'-deoxy-2'-fluorouridine-3'-phosphate
  modified_base 9: mod_base = OTHER; note = 2'-deoxy-2'-fluoroadenosine-3'-phosphate
  modified_base 10: mod_base = OTHER; note = 2'-O-methyladenosine-3'-phosphate
  modified_base 11: mod_base = OTHER; note = 2'-O-methylguanosine-3'-phosphate
  modified_base 12: mod_base = OTHER; note = 2'-O-methylguanosine-3'-phosphate
  modified_base 13: mod_base = OTHER; note = 2'-O-methyluridine-3'-phosphate
  modified_base 14: mod_base = OTHER; note = 2'-deoxy-2'-fluorouridine-3'-phosphate
  modified_base 15: mod_base = OTHER; note = 2'-O-methyluridine-3'-phosphate
  modified_base 16: mod_base = OTHER; note = 2'-deoxy-2'-fluorocytidine-3'-phosphate
  modified_base 17: mod_base = OTHER; note = 2'-O-methyluridine-3'-phosphate
  modified_base 18: mod_base = OTHER; note = 2'-O-methylcytidine-3'-phosphate
  modified_base 19: mod_base = OTHER; note = 2'-O-methylcytidine-3'-phosphate
  modified_base 20: mod_base = OTHER; note = 2'-O-methyluridine-3'-phosphate
  modified_base 21: mod_base = OTHER; note = 2'-O-methylguanosine-3'-phosphorothioate
  modified_base 22: mod_base = OTHER; note = 2'-O-methylguanosine-3'-phosphorothioate
  modified_base 23: mod_base = OTHER; note = 2'-O-methylcytidine
tttttgataaggtttctcctggc

SEQ ID NO: 334 - RNA, 21 nt, synthetic construct
  source 1..21: mol_type = other RNA
  modified_base 1: mod_base = OTHER; note = 2'-O-methylguanosine-3'-phosphorothioate
  modified_base 2: mod_base = OTHER; note = 2'-O-methylguanosine-3'-phosphorothioate
  modified_base 3: mod_base = OTHER; note = 2'-O-methyladenosine-3'-phosphate
  modified_base 4: mod_base = OTHER; note = 2'-O-methylguanosine-3'-phosphate
  modified_base 5: mod_base = OTHER; note = 2'-O-methyladenosine-3'-phosphate
  modified_base 6: mod_base = OTHER; note = 2'-O-methyladenosine-3'-phosphate
  modified_base 7: mod_base = OTHER; note = 2'-deoxy-2'-fluoroadenosine-3'-phosphate
  modified_base 8: mod_base = OTHER; note = 2'-O-methylcytidine-3'-phosphate
  modified_base 9: mod_base = OTHER; note = 2'-deoxy-2'-fluorocytidine-3'-phosphate
  modified_base 10: mod_base = OTHER; note = 2'-deoxy-2'-fluorouridine-3'-phosphate
  modified_base 11: mod_base = OTHER; note = 2'-deoxy-2'-fluorouridine-3'-phosphate
  modified_base 12: mod_base = OTHER; note = 2'-O-methyladenosine-3'-phosphate
  modified_base 13: mod_base = OTHER; note = 2'-O-methyluridine-3'-phosphate
  modified_base 14: mod_base = OTHER; note = 2'-O-methylcytidine-3'-phosphate
  modified_base 15: mod_base = OTHER; note = 2'-O-methyladenosine-3'-phosphate
  modified_base 16: mod_base = OTHER; note = 2'-O-methyladenosine-3'-phosphate
  modified_base 17: mod_base = OTHER; note = 2'-O-methyladenosine-3'-phosphate
  modified_base 18: mod_base = OTHER; note = 2'-O-methyladenosine-3'-phosphate
  modified_base 19: mod_base = OTHER; note = 2'-O-methylcytidine-3'-phosphate
  modified_base 20: mod_base = OTHER; note = 2'-O-methyladenosine-3'-phosphate
  modified_base 21: mod_base = OTHER; note = 2'-O-methyladenosine-3'-phosphate
ggagaaaccttatcaaaacaa

SEQ ID NO: 335 - RNA, 23 nt, synthetic construct
  source 1..23: mol_type = other RNA
  modified_base 1: mod_base = OTHER; note = 2'-O-methyluridine-3'-phosphorothioate
  modified_base 2: mod_base = OTHER; note = 2'-deoxy-2'-fluorouridine-3'-phosphorothioate
  modified_base 3: mod_base = OTHER; note = 2'-O-methylguanosine-3'-phosphate
  modified_base 4: mod_base = OTHER; note = 2'-O-methyluridine-3'-phosphate
  modified_base 5: mod_base = OTHER; note = 2'-O-methyluridine-3'-phosphate
  modified_base 6: mod_base = OTHER; note = 2'-deoxy-2'-fluorouridine-3'-phosphate
  modified_base 7: mod_base = OTHER; note = 2'-O-methyluridine-3'-phosphate
  modified_base 8: mod_base = OTHER; note = 2'-deoxy-2'-fluoroguanosine-3'-phosphate
  modified_base 9: mod_base = OTHER; note = 2'-deoxy-2'-fluoroadenosine-3'-phosphate
  modified_base 10: mod_base = OTHER; note = 2'-O-methyluridine-3'-phosphate
  modified_base 11: mod_base = OTHER; note = 2'-O-methyladenosine-3'-phosphate
  modified_base 12: mod_base = OTHER; note = 2'-O-methyladenosine-3'-phosphate
  modified_base 13: mod_base = OTHER; note = 2'-O-methylguanosine-3'-phosphate
  modified_base 14: mod_base = OTHER; note = 2'-deoxy-2'-fluoroguanosine-3'-phosphate
  modified_base 15: mod_base = OTHER; note = 2'-O-methyluridine-3'-phosphate
  modified_base 16: mod_base = OTHER; note = 2'-deoxy-2'-fluorouridine-3'-phosphate
  modified_base 17: mod_base = OTHER; note = 2'-O-methyluridine-3'-phosphate
  modified_base 18: mod_base = OTHER; note = 2'-O-methylcytidine-3'-phosphate
  modified_base 19: mod_base = OTHER; note = 2'-O-methyluridine-3'-phosphate
  modified_base 20: mod_base = OTHER; note = 2'-O-methylcytidine-3'-phosphate
  modified_base 21: mod_base = OTHER; note = 2'-O-methylcytidine-3'-phosphorothioate
  modified_base 22: mod_base = OTHER; note = 2'-O-methyluridine-3'-phosphorothioate
  modified_base 23: mod_base = OTHER; note = 2'-O-methylguanosine
ttgttttgataaggtttctcctg
